United States Patent Application Publication US 2022/0211063 A1 - sequence listing, part 44

SEQ ID NO: 151 - DNA, 8605834 bp, Penicillium roqueforti (residues 1,721,168-3,442,334 of 8,605,834)
  misc_feature (89143)..(89590): n is a, c, g, or t
  misc_feature (91422)..(91652): n is a, c, g, or t
  misc_feature (329880)..(330016): n is a, c, g, or t
  misc_feature (430767)..(431098): n is a, c, g, or t
  misc_feature (461650)..(461666): n is a, c, g, or t
  misc_feature (496409)..(496588): n is a, c, g, or t
  misc_feature (532012)..(532106): n is a, c, g, or t
  misc_feature (539762)..(539897): n is a, c, g, or t
  misc_feature (569546)..(569750): n is a, c, g, or t
  misc_feature (649063)..(649199): n is a, c, g, or t
  misc_feature (691124)..(691186): n is a, c, g, or t
  misc_feature (866509)..(866673): n is a, c, g, or t
  misc_feature (1032465)..(1091864): n is a, c, g, or t
  misc_feature (1092551)..(1092762): n is a, c, g, or t
  misc_feature (1210222)..(1210434): n is a, c, g, or t
  misc_feature (1240580)..(1246852): n is a, c, g, or t
  misc_feature (1247779)..(1253711): n is a, c, g, or t
  misc_feature (1258330)..(1372329): n is a, c, g, or t
  misc_feature (1374163)..(1374571): n is a, c, g, or t
  misc_feature (1457570)..(1457856): n is a, c, g, or t
  misc_feature (1505383)..(1505555): n is a, c, g, or t
  misc_feature (1513254)..(1513416): n is a, c, g, or t
  misc_feature (1624076)..(1624277): n is a, c, g, or t
  misc_feature (1669186)..(1669391): n is a, c, g, or t
  misc_feature (1761254)..(1761480): n is a, c, g, or t
  misc_feature (1817801)..(1926100): n is a, c, g, or t
  misc_feature (1933201)..(1933451): n is a, c, g, or t
  misc_feature (1964013)..(1964390): n is a, c, g, or t
  misc_feature (2150548)..(2150646): n is a, c, g, or t
  misc_feature (2196778)..(2196986): n is a, c, g, or t
  misc_feature (2250772)..(2250828): n is a, c, g, or t
  misc_feature (2391584)..(2391875): n is a, c, g, or t
  misc_feature (2493614)..(2493845): n is a, c, g, or t
  misc_feature (2532220)..(2532497): n is a, c, g, or t
  misc_feature (2536366)..(2536607): n is a, c, g, or t
  misc_feature (2786762)..(2787018): n is a, c, g, or t
  misc_feature (2859720)..(2860011): n is a, c, g, or t
  misc_feature (2874131)..(2875235): n is a, c, g, or t
  misc_feature (2881752)..(2882057): n is a, c, g, or t
  misc_feature (2897306)..(2897484): n is a, c, g, or t
  misc_feature (3050874)..(3051598): n is a, c, g, or t
  misc_feature (3057389)..(3057640): n is a, c, g, or t
  misc_feature (3069739)..(3070114): n is a, c, g, or t
  misc_feature (3075970)..(3076344): n is a, c, g, or t
  misc_feature (3305361)..(3305458): n is a, c, g, or t
  misc_feature (3318647)..(3318971): n is a, c, g, or t
  misc_feature (3502937)..(3503051): n is a, c, g, or t
  misc_feature (3538222)..(3538805): n is a, c, g, or t
  misc_feature (3783649)..(3783863): n is a, c, g, or t
  misc_feature (3992502)..(3992620): n is a, c, g, or t
  misc_feature (4005402)..(4005665): n is a, c, g, or t
  misc_feature (4027592)..(4027792): n is a, c, g, or t
  misc_feature (4058717)..(4058863): n is a, c, g, or t
  misc_feature (4267467)..(4267504): n is a, c, g, or t
  misc_feature (4352970)..(4353432): n is a, c, g, or t
  misc_feature (4361969)..(4362121): n is a, c, g, or t
  misc_feature (4393887)..(4394120): n is a, c, g, or t
  misc_feature (4451619)..(4451756): n is a, c, g, or t
  misc_feature (4461648)..(4461894): n is a, c, g, or t
  misc_feature (4481354)..(4481472): n is a, c, g, or t
  misc_feature (4534019)..(4534156): n is a, c, g, or t
  misc_feature (4590279)..(4590507): n is a, c, g, or t
  misc_feature (4669101)..(4669433): n is a, c, g, or t
  misc_feature (4737275)..(4737369): n is a, c, g, or t
  misc_feature (4766897)..(4767094): n is a, c, g, or t
  misc_feature (4834677)..(4834984): n is a, c, g, or t
  misc_feature (4927667)..(4928240): n is a, c, g, or t
  misc_feature (4945248)..(4945398): n is a, c, g, or t
  misc_feature (5082668)..(5082816): n is a, c, g, or t
  misc_feature (5112709)..(5113430): n is a, c, g, or t
  misc_feature (5314787)..(5314980): n is a, c, g, or t
  misc_feature (5372720)..(5373147): n is a, c, g, or t
  misc_feature (5459101)..(5459212): n is a, c, g, or t
  misc_feature (5480412)..(5480585): n is a, c, g, or t
  misc_feature (5535554)..(5535568): n is a, c, g, or t
  misc_feature (5567702)..(5567841): n is a, c, g, or t
  misc_feature (5598930)..(5599143): n is a, c, g, or t
  misc_feature (5726966)..(5727044): n is a, c, g, or t
  misc_feature (5743477)..(5743945): n is a, c, g, or t
  misc_feature (5807639)..(5807725): n is a, c, g, or t
  misc_feature (5919971)..(5920649): n is a, c, g, or t
  misc_feature (5921963)..(5922269): n is a, c, g, or t
  misc_feature (5942845)..(5943124): n is a, c, g, or t
  misc_feature (6011310)..(6011605): n is a, c, g, or t
  misc_feature (6325131)..(6325449): n is a, c, g, or t
  misc_feature (6397541)..(6397652): n is a, c, g, or t
  misc_feature (6604798)..(6604968): n is a, c, g, or t
  misc_feature (6843737)..(6849488): n is a, c, g, or t
  misc_feature (6859843)..(6860483): n is a, c, g, or t
  misc_feature (6915200)..(6915987): n is a, c, g, or t
  misc_feature (6919291)..(6924161): n is a, c, g, or t
  misc_feature (6950610)..(6950746): n is a, c, g, or t
  misc_feature (7010146)..(7010383): n is a, c, g, or t
  misc_feature (7088736)..(7088959): n is a, c, g, or t
  misc_feature (7281029)..(7281208): n is a, c, g, or t
  misc_feature (7435388)..(7435513): n is a, c, g, or t
  misc_feature (7580067)..(7580387): n is a, c, g, or t
  misc_feature (7598064)..(7598213): n is a, c, g, or t
  misc_feature (7639278)..(7639394): n is a, c, g, or t
  misc_feature (7648488)..(7648695): n is a, c, g, or t
  misc_feature (8007457)..(8007643): n is a, c, g, or t
  misc_feature (8053200)..(8053665): n is a, c, g, or t
  misc_feature (8129339)..(8129754): n is a, c, g, or t
  misc_feature (8134049)..(8134237): n is a, c, g, or t
  misc_feature (8188324)..(8188473): n is a, c, g, or t
  misc_feature (8240007)..(8240478): n is a, c, g, or t
  misc_feature (8245915)..(8246026): n is a, c, g, or t
  misc_feature (8305192)..(8305782): n is a, c, g, or t
  misc_feature (8314148)..(8318265): n is a, c, g, or t
  misc_feature (8345463)..(8345564): n is a, c, g, or t
  misc_feature (8407840)..(8408046): n is a, c, g, or t
  misc_feature (8424732)..(8424857): n is a, c, g, or t
  misc_feature (8481626)..(8481849): n is a, c, g, or t
  misc_feature (8597147)..(8597393): n is a, c, g, or t
tgtgcaagtccgattgtttggatgttcttgaatcgatccatacattcccgaagtcgatcactgaatgcttctgattccagcaggttgcgattatccgcaatcatatctttttggaccgtacgccggctttccagctcgtcgcctttgacttgccggcagctttttgacgatatagatatcataccgaggggcccttcagcgccatcgaataccacagggatcatccatagctcttgaacgtgctcgcggagaccatttgacttagataactcttccagttcgtggagactttcgtttgtcgcaatgaaacagatttttcggtaaaaggtcttcgcaaaattctccagtgagcttttatacaatgcgcggcatgataacctcagagcgaccaattcctgataatccaaatggtcatatatctttgagatcaattccacgggcaaggctgcaatggacattttggctgcgtgcgcgacgtttcgagattgagaacaataataaccaaaaagctcggtttattatccgcagaaataagtaggaatcgtagaagaattgcttttcaatttcaagttccgaaattcacggggaaaaaaaacatggagttcagtgaccaggaatggcggacaatggtgtctgccagaatttgcgcgaggtagaaagcatttcaaaggaaaagaggaacaggagcagaggcgaggattgtgattccaaacaaggactagccctggagcactacttagtaagggatactgcacacaaagtaggcagtccgtccggtacctgggacaggtactgataccggttggtcgtcccggtatcaccacccaaccgagaaatgcgcactgcaagtttaatatacgcactgcaaacacgtgaacatttcaacatttagttagttagaggtaatcaacgtactgacataatacatgaaaaaaagggccgtcctgtttatctgtctttggtacaagcccaactcacctctcttagcacccattgaacacgaaaagctggagccacgataggccttttaactctggtacaaagtgccaatctatcacacctcctggcattcagaacgacagctttcatcgcgtattggatctcggtctacatatatcgagtcactctacatccgctcgcgaaatttcctggcccgaagcttacaggcgcgaccttctggtacaagttctactacaatctatttccccacaaactgcgctttctctggaaaatcgaagacctctataatcagtacggaccaatcgtacgaatcaatccactccacatccatatccgagacccggagtatcttgacgacatctacactagcggacgccgcaagcgcaatcgcaatgagtggtttttccattcctccgtccgatgggatggtcattattcaatatagtcgatcatgacgtccagcgggtgaggcgcgctacgaagggcgcgctacgcttagcccattcttcagcaagcggtcaattcaagctctggaggaccgcgtcgtagataagatcgatattttggtagatcgaatcgcagaagcccgtcagaccggagaaaccgtgaacttgctctttgctgcaggtactctgactatatatataatctctgcttatacatttggaaaagattggaataagttgggtgagcccgactaggccgaggaggagctcgagggctacgccaagatggcgcagataggaccttttactcgtcaattcctataggtagccaaagcggtcattatattgcttctacctaagttagtgacgaagctcagtccagctgctacgcttgtactatggaacagagccctgttcaaggacatgatctagactgcagtcgaagaagaaaagactagtcagcttgaaaaatctgtatcctagtctatattccaggatatccttcagagcaacctactgcccagtgacaaaacccctgctcgcctttcagcggaggcaggtttgcttgtcatggggggaactgaaacgaccgcgagatctttagccgtcattttattcctgcttcttgacaccccgcatgtcttagatcgagtaaggaaggaactggcacagcatatgccccggcctgactcccgcatttcacttgctgagctagaagccattccttatttcgtgagttgctgctgacatcagaatgattcccataacgtcatatgtattaaccaagtcctctagtctgctatgatcaccgaaggcgtgaggctatctcacgttgtttcgagttgtataccaagatacgcccccgaggaagagctcaaatacaaggattggacgattccacccggcgtaagataaacaaccggaaacttctttggcacacgttgctaacaaaccaatcaacacaacagacaagtgttatgcaatcgcattacctccttcatactgatcccacaatcttcccagaaccatatacattcgaaccacaacggtagattgacgacccttcattaagggcaaactacttcggcaaactacttcttgggtttcggccggggtaccagagtgtgtctcggtatcaatcttgctaacgcagagttgtatctcgcagtcgcctatatctgtgcccgtttcgatatggagctatttgagactgaaagggagcgtgatgtggatgtggtcatggattctgttattagacaacctagtctggagagcaagtggatcagggtcaagatcacaagagatagactccaggatgagcaagcttagagggtgttagatcgtccaaggctttgacgatatcaacgacaccgacaatttcttggagagtacgagagtatccaaatcttaccaacatccaacatttgcgataacatcctactggtccataaattgggagttgtcccaatcgagcacggattgatatggtccccacatagcaggcgctttggaaaacgccacgggaaaaaaagagtaacattccacgggataatctccacagttcgtactccgcaggttaaggtcagccagcctcaatcaaaaccactaggcttaaattagcccgaggaaaggccaccagtctcgtttgattggttcgctcaatggggctatagataaatcccacggcccacggagtttacgactaagattttccggtacttcggtgctcctctctaaccgaggggggtccccgaacttggaataaataacctttggaattgtataacattagaagccttcggcccttaaatactattcggtcatactttacaaggatctagttcaaatcaacactttatttctcaataccttatgaaaattaagaactggttacaacaaccgtacaatgtctgccagtccaagtgaaaataggccaccagtcagagttgccaattgctctggttatcatggtatggggagcactgagattaaaccaacaggactaacgtacaaaggtgatcctgcatacgaaatgtatcggcaagcgactctaggagatgttgacttcatcacgggcgattacctggccggtaggttgcttggtataaaggaaagagataccaaggactaactaagctcagaggtcaacatggcaaataatgcccagtccttccaacgtggcgaacaccccggatatgagcagacagcctggcagggtatccagcagaccatcaatgtgattgccgaaaaaggcatcaaagtcgtactaaatggaggagctctcaaccccaaagggctagctttgaaagtacacgaattggttagtacaattcctcaactataccaatctatatactaaatcaatcgtccaaatagatccaccaaaaaggcctcgctttacgagtagcttacctatctggggacgacctctacaccaaattcggccctaacatgccgcaatccccagaacaactccaacacctcgacgccgaaaacagttccatcaaacctagccctctcacctatgcattcaccaacaccaccaagcctatccctatggtttcagcacacgcctacctcggtgcccggggaatcgtggacggcctccgtcgtggggcagatatcattatctgtggccgggttgcagacgccagtcctgttattgcggcggcgtggtactggcactcctggtcggagtcggactatgaccgtctggctgggtccctggtggcgggtcaccttattgagtgctcagcctatgttacgggcggtaacttctctgggtttgatcgacaccccattgatatgtttgttaagccgggcttccccattgcggagattgatgtcgatgggtcttgcgtcattgcgaagcatcctggaaccggtggtatcgttgacgttgatactgttcggtgtcaatttttatatgagcttcagggaaatatttacctgaatagtgatgttagtgctgtgttagatgatattgtggttgaacaagttggaaaggataggtaagtttccttcttttattcatcgttgtgttggtctgcttactggagtctagagttcgtgttcatggagtacgaggctatgcaccccctccaacaaccaagctggctgtgttttatcctggtggtttcgaggcccagcttttactgaatgctactggatatgggtctgataagaagtgggatctgatcgaaagacaactccgacatttcattccgaaggaatccatcgataagatcgagacacttgaattccaaaggtacctttctctcctctttcagcttgaaccagtgctgacagaatatctagaatcggtgttcctgccccggaccctcgttcacagcgacaaagcacgacatacctacggatctttattgctgcagtcgaggccgatgccgttctcgctgtcgcaagagcaatgcaagaaatttctctcaaacatttctcgggtgcggaccaatatctgttatagtaatatccatactccaagctgactgaccactcaggattccactcctctctcgacatgcgcacagcagtcccacgtccattcctagcctactatcccgctatagtcaaacaggatgatctcgacgaggagatccacttcatcgacggacccgattctatcatctcgttcccaacaggtcatcctccagcatacaaagctctgcagccacgcgtaagctacaaccacaccccatccagcgatgaagtcgccctcctccaatctccaactcggtctattcgattgggagacattgctcttgcccgatctggtgataaaggatctaatctcaactttgggatctttgtccctgacgctactcactggccttggttgcggtcttatatgagcgttgaaagattgcgagagatgctcgttgatgatgatgactgggatgagtccttcttagttgagagggtagaattcccgtacattcatgccgttcactttgtgatttatgggattcttggtcggggtgtaagcagctcgagtcgattagatgggtttggtaaggggtttgcggattatgtgcgggataaggttgtggatgtgccggcggagattttggattgagtctttattcatcttgtgggacatatcatgggtctatctattagtgagatgcggaaattttatcatgaagtctagaagacacatattggacatgcttatcatgcttggaccaatgaacaatgcgcacatcgcatgaaacatcaattgttgaagcatgcacgatcattcatgccactgccaggatagcgacagcccaaggatccatgcttattgaataatttccctgtccattgaagacacccgtagtggtggtctgaatttgcacgttgaagggcgtgttgccttggtacttagggccagcaagcatctcaagtttaccagtttgggttcctggtatactcacttggacattctgatgttcggggccatagtttgccagtttcaagtagtattgtgaacctgtcttcgaagccacccagtaaagaggtccaaatcctgttgatgagtggactggaagaatggtgtcacccttgttggatgcgaacatcttttgcacaaaatatgaaacagaaggagtgacagagtcgggagtcgaactgaaaccgtatagggtgggctataagtaaaaacagcgcggtcagctatgtttgcactgttcctttaacgtcttctgggtagatattcttaccgaccaagacacaaaatcaaagtgttgcatcaagggtgcataagccaccattttcacaatatcactgttgcgttcgattccgatcatgtacacagcctcactgcagctgccctgcatgtagggccagtatgttcctgtctcttttgtagtattgcgacatccaaactcaccaatcatcactgattgattccgaggctggttgtcaaactggtcgaacaatttcacaaagtcatctggtgctcggtaaagatgcagatcaatgatgacattttcgggaagcggagatggcaaacacgaatagtccccgttggaagcaacaaaagtgatgtgcgggtacttgtcgtggatggccttgtagatttgattgaaacgatccggataggtgtcacagccacgggtgaggtcatcttcgttaccaatttcaataaggtcaaccttccacggatctttccggccgttctgagctcgcagtttgccataatgtgtcgaggagtcaccaaacagatactccatctcgttcatgatgtcgtggacaaaaggctcgaggtccggcccggagagaatatctccataagacttgcctgaccacacagccaggagtggcgccatgttcatgtcttcacaccaccacaggtactcgtccaggccgagggcatctgtattggggtaaaaccagtcgctctctcttcctggacggtcgactacgggtccaatcgtggtgttccacttccagcgagaatcaacttccaggccttcgaggttgttcccgcctgggaaccggagaaacgccggattaacttcatccagaaacgatgcaaggttatgtcgcaacccattttctcttcctttgaaagtgggagggaagagttggattaagccaaagttcaacgagctaccggcaactttcgatccatcgaatgtcaaatgccactcattatccccttctggtgcgtaggtagtgttgaacctagttttgaattccgtaaatttcgaatgcgtactcttcacggtcaaattgtgatcggcatataccgagccattatgcgacccaacaagccgcaggttgatggttcccgagtatttgcccatcatccagaatgaacagttgtatgtggcacccgtaacctgaattccgttgtaaccagaattggcaaatccgacatagtctttcaccccatccggcacttcgaccttgagcgaagacgtaattgctttgctgacaggctttgatctatcctgggagattgtcacatctcccaccggagcgtaggcagttaaaccaagactagttccttgaaatccattgttctgcagcaattgcccgtggattccaccatcgccttgagatagttagtaatgctagtgagcagcaaattcgagttccataccagaatggtccatttcctaacaacatcacggatcagcaacacagtcattcgcgcatagagttagctcttttctcacctcgaacataaccccatatagaagtggactcgacttattcccaccgtcccttgcgactgccagtttgacaggagcagttgaactattccctttcgccaacgcaccggctaggcatgtagccatagcaacaaatgtcgcgagaccggcgcatgacacagatccagacttcatcacgagtcagagcctatagacaagtatatagcaaagagttgcagaggagtgaaaagtgccggcaagaatccaagctcgggaaggtcaagcttttcaagacgcactgcccctgctttgaagaaagtgccttgcactgctatgggtgtgattcgttcgttttggacctggcctgacagtattctccacagaagcatcatggaccctgagatggagcccgcatgcaaatcaaccggtcataaagcctgggatctaccgacatgtagggaaccacaacgagcatctttaaacatcccgttggatcatgctatttatttcttgcacaccccaatttggcagtcttcctacatcgtggcttatgtatctgtgtgcactgcgcagacaggtggagagcagtcatgacgtcggataactcccaaggtcggatcgggatgttagcctgagcaaggcatccgaattttgccttggcatttaggcgaataacaagtcttgatatttaccagaaaagatatttcgcttgcttttatcagctcacttctgataacaaacaaaaataatgatcaaagacgagactaagtctaagaaggcggtgtctgatctgccatctcacatgtctctatttccaaatcgggattagctttcttctttccctatctaagcttgcctcgatttcatcaatattcttctccgactctgaacctcagagtgaaagatgaagtacattgtggtatctggaggtgagtttaacagtgatctgccagaagtggctccgccgttagcctgcggagaaaagcggggcagactccatatctcacgtttagcctttcgaggtataacagacataatagactgacatctctaggcgtcatttctggggcagggaagggcatcgtcgcttcgagtgcaggtctgttgctccaaagcaaagggtttgtcgtcagcaccatcaagatagatccctatatcaacatcgattcggggactatgagcccactccagtgagttctgcagatctgagcagcttctgcggatccatttattgatttatctagccatggagagatctttgtgacagatgatgggggtgagataagtcttgacctcggcaacttcgagcgttacctttcaaccactctccagcatggtcataacatcacaactgggaagatctatctagatatcatatctagggagcgagctggcgattatttaggcaaaactgttcaggtggtgccccatgtcaccaacgccatccagaattgcatcgaacgggtagcgaagatacctgttgacgaatcccaagccgagcccgatgtgtgtatcattgagctaggtggtaccgtgggggatatcgagagttcgcccttcatctacgctcttgctcagcttcgaaagagggttggcaaagaaaacctcgttcaaattcacgtagcttacgtccctgtcgtgccgtaagctcttcttgtttcaggcgagggcatactgctggaatctaacgccaggctaggccgggagcttctggtgaacaaaagacgaagccgactcaaagatccatttccgacgttcggagcgctggattgagtccacttctagtatgctctacatccatgtgtatcacgcactctaagctaattgaaaaaaggttgcctgccgctgcgaggtgccactagatccaggtaccatccaaaaaatcgcgaatatgtgctcaatggaaccggaacaggttatttccgtacacgacgggccaactacatatcacctaccgctactcctcgagaagcagaatcttctcagcatcctctgtgagtatctccaacttccacttggtcagacacccacccagcgtatcgaacaaggcaggcgcacgtggagtgactgggttcaccttgttcaaagccaagatactatcaccgacacagtctcaatcgcccttgtcgggaaatacacctccaataaagatgcatacctcagtgtttccaagtcaatcgaacatgcagccatgtactgtcacaagaaagtcaagattgtatggattgactccgcgcatctcgagcaggagacctatcagaactctgcagtcaagtatcacaaagcctggcatgatctctgtagcgccaagggcattgttgtgcctggtggttttggtactcgcgctaccggcgggatgatcaaggcaatcacatgggcgcgggttaataaaaagcccttcctgggcgtatgcctcggcatgcaactcacagtggttgaatatgcccgtcatgtgatgggtatctcggacgctgggagccaagagctccacccagaatccaagaaccatgtgatcattcatatgcctgaacgcaatcaagagaatggccgtgacaccatgcgtctgggcaagcatccatgcatcttcaaggagggtactgagtggtcaaagctacgatcgttgtatggccccacgatttctcaaattgaggagcgtcaccggaaccagtacgaagtgaacccggaaattgttgaggaacttgagaaagccggtcttgctgttgttggcaaagatgctaccggcaagcgtatcgagattgttgagattcgcgatcatccctttttcgttggtgtacaattccaccctgaatacttgagccgtgtgttgcggccgagcaaggtgtttctcggcttcttcgctgcggcggctaagtgcttggagaaaatacctatggcattgcaacagggccggcgaagccttgcggaagaagatgaagaagcgatgggcaacttttgaagctcttagcgtcatctcattggttggtcttgttcttagcgccggcgttttaagttgcattgacaactaaggaatcggataatttcaattagaaatcaatactttcattgttttactttttcgacgaacatttataataggaattagaacctgcaaattcagatagtcgtgcagttccaatgttttttttcctgacaactacataaaagcttctcagtctataccacaacataatttcactcacatagaattgcaaagataaccaactttccgaacaaagcagcatgaattactgcagcaaagataaaacctctcaaagtaggaccacctgcagaaaatgaagtcgttatgaaagtcgcctacaccgccgttaactccgtggatggaaggcaagatcttgccaactttcaggcatttattctagggtgttgttagatgtattattctaaccagattttagctacaagtataaacatgcatatgaactctgtagtaaaggtggatagcactatgactgactttgtttgagctttacatgagaaaatagaagcaaattctactgagtagagcaatattattatgtgattgatgtatttgagaacttgagccgatctagaaggtgagcagttcttccatggccatgtcgtcaatttatttcatgcaagagaaagcccggaatgcaagttgagaaagccaagcgaggagaagggaaacaaacacaatcataaccagaatccgaagagggatggagatgcacgtggacagtgaagttcacgacaagactcaacaaggtagactaccaggttgacattgacaccgaggatgatgaataagaagaagaaagaagtgggtgtataatgcatatggtggataaggataatgtgtacagagaatgtagaagaaaggtccgagcctaggttttaggtcagatcaaaaccaagacagaacgaaagtcctgccctgaaaggctggaaagaaaaggctttgccaaattggaccaaagaaggtggtgaggccgggtaggagggagggaaggtgtcacatgttgtcggaggggctgcgttacaaggccaagacaatcggcttaattcgtcgcccgcttccagaacttccagccctctctcctctcctctactccgacgccaacaagacgctcaataccttcagggccctcggcattttcgaacttctgttgatcgatctcttcacctccctcttcgtccgatccattacgtaggacggccgggtagagaacaccgacaccgtcaccgccgagggtaacctcatacgtagtgaaaccctcctcctcaaacctccgttcgagatcctgcttgacttcggccttcgcgttgggccggaggagggtaatggcacatccgccaccgcctgcaccggtcagctttgtccagccaatgtcggcgtaatcgacaagttcacgaatacgttcgaggcgggggtgggagacgcccagggagacaaggaagccgtggtttatacggatcagggttccgaaatgggcgagggtggcctcggagatgccctcgaagctagggtcctcaatcaaacgttgtgcagagctcgtcacttgatcgatgccgttaagtattgactccgtcacgatggagtgagcgtctcttagagctccgactttgtcgacttctgtctttgtggaacgcgcttgttgggtgtcgacaagtaggagagggagttcggggaaagtaggtagcgagacgactgttggaggtttcgtgtaatcatcgcgtcggaaaatcacagccttgccgcctgcggccactgtgttatctaccccactgggattgccatggatgcagagctcgccgacgaatgcccagcggttgatacgttcgatctgtgtctctgcctcctccggtggctggtctgggtggggcccggcgagggtacggatttgaagaagcagcgcagaactgagacagacgcagacactggcactgctgcctaggccggctccggtagggatggtggatcgaagagtgtagatggcgcctgggctttgcggggagcctaaggagaggaagagatagaggaacgaggacgcggagcggatgtgaatattgcgctgctcctctgggaggcctttagagacgccctggaggtgtggttcgattgcctcgacgagttctgggtcgagttcagtgacaaggctgtagtaaaacttctttttggacggctcgtggaacttgtcccaaggtagggtgtcaatatcccaagtgtgactaagacccaagtcccggaagttcagggttatcgtgcgctgcgatttggaaagggtagtgacaagaaggtaggagcgaagagagatggctgcggccatggcagccttgccgtggaccacagcgtgctcgccaaagacgataaccttgcccggcgcggacaccatgaaggtaggtgccatgggcgaagaggccttgcgagtcattatcgggcggtttcgttccccagtagcggttgcttcgtgtgtttctgaggcggaggagacggaggcgctgtcggagctatcgtcccggacacagtttccgttcatacccaaggggatgactttaaccgtgctttcgggatggaaatcgactgtacgacgtgaaacgggaattgtggcccccataccgttcaatgggcgagtggcattctcagtcatgacagtggaattcgaggggcgagaaaggggaagtgattaggaattaaaaggatagaaatagaagacaagtcaacataagcaaaagaagaatgagggggggagtagaagaatagcctaagttagagatagcccgagttatctggagtaagcaaatggagtccaaagttgggggagaagtgattgaagctactgggtataccagggaacgagagagaaacggtccaatcacagccacaacaataccaattggtcatattagacctagttaggctgactagttagctagttagttagctgttggcctatttcgtacttcgtttcccgtctcgattactcgttatgtcccttcgtcttggacaattctgcctttgcatatccaagtgcagagatttttgtggcgtgcagtagcgccgggatcgtctctatgccttaatacatacttccaatctaagaaaatctaatgtgctatgtacaatgctgtattcatcacaaattcatcgtcacggtcatactgttactatgcaccagtaaacaagggggcaggccggtccacagaacatccaggtcactcaaataagatgcactgtcctcggcactaagcgaagtcccctccacgggagacggcagagtcgtgaaaataacggcggtatcaccactctgctggaccatcaactcgttcagaatcaaatgctgtgctcgactcgggaggtcattgaaagacaatggaaccgacgctacaccagggtatcctgttgcatgtgtatgtgaattgctgggggcaccgggggagggagaagacacgggagatgggcgatgggagtagatagagtctagcttgtttgcagatcgtggaggtgagctttgcgccgcgaacatgatagacggtccattgccgtcttcggcttcggtgttcactttggcttcagggataggtgaggagctgaaccgatttctggaggcagaacggctgatggggggccgaggacccggggtattgcttttcggggagccatcgtcgccagtctcaattatagatgggattatctggttggatggcgttgcctctgcttgagggctcgcactcactggtgtgctcggggagtctgcgctagggctgcaatcatcggtcttggaccgaccaaggagtcttgaagggccgggaacaggtacatcctcatttcgagccctggctatgtcctctccgccgtcttctggctcgctgacatacgcttccagatcgctgtcgtcgctctcactcgggctatcggagctgtcgtagtcgacgaacgcatccagcaagcgatgcgtttgcatgccaaggttcactccgcctagagcccggaagctggagacagatcgtctgcgacgagtggactgaatcagtttcctcaagccagtcacccgatgatacaaaggtttggctccactgtcttggctcgatgatccttgccaggtatatgacttatcaagatggaaactgtcgctggttctatccgaatcctgcgggtcctgatccagcgcacgagctcgtaagaccctttgccaccagtcctccccctgtagagcagaattaaccctctcttgggcatcagctgtaaccgaagtgccattcacgatggtttgataagcctggagatcaccgcaggcaagccagaagaccaagacttcggcttcaatgcgtaatttctcaaggagggcctcaactcgcgctctttcatcttccaaatcggtctcgtactcgacgaacaccgcaactcggattttgtatgtcttcttccacgagggaacagtgttgagaatacaacccagttgaaggatcaaagtgtatgtgtcaaaattagtggtcagcacattttgcttgctttcactatcagccccaagctcggcggacatttggatcggccacaaatcaatatacttcttagtgtgacgaccgcgggggtccggtagctccagatcttcgaatcccttagctacggcaacattgatccgaagcttgaataagagatcttcgaggatcgtgacataacactgcccactcatgggcgggtttgccgccccagactcgctgggctcctcggttcgcgtgctcgagtggagcgaatggcgtctaacccttgaatctctacgaccactggtataggtttcaacaagcgactggtccgatcggaattggtcaatcacaacgatgttgggcctcatgccgcccagtccggaattcaaaacaatatttcgcataccccattccgcagccggggaaatggcaatgttgacgaaggctttgatcttggaatgctcgacgaattttgtccatgctgtctgttggcgacgtgcttcggggacagctgctgaaaagtcatcggtcacaagaacatgggccagcacaaacaaagatcctttcttcaacgagttgcagaaggagaccattttgtattgtctgtcgaggtcgctgacaaagagcaggatctgaggacgccagaacttgacgtgctcctgacgcaggcgaagcaggtattttcgcacttgatgatagatcaaactttgactgacatcgccccaaggcttgggtggcgagctataatggatcagcaagaagagaatcaccaggatgcctacacatcctgtagcgtagacaccgtccacaaaaaacatgctgatcccactgacgagcgttccagccgctgcagtctgccagttgaagtagtggaacgacggacgaaagttgggtgcagagccaattttcaagaggaaacacgcgaggttcgtcacaaggaaagtcatcaagtaggtcatggtaacaaaagacgcgatgcgattgatgtcgaagagcattgtgatctgagcgaacacaaaggtcacaatgatggcatatacgggatcgtcggttttatgtgtgccttgggcaaatatccctataccaggcaagaggctatctcgcgcaatagcttgaagaagtttagctgatccaatcacgcccatcagggcagaaaagaaactagttgcgaattcaccgagaagaatcacactatcagaggcattcacctacactcaattagagcgtgcttgtagttattctctcaaaaaagaaggacttacgatttgtataacattcacgttattataaaaagactcccgggtcaccgaggccgccatcgcaaggatgacaagcccatatgcgacaaaagtcaaagctaacccagagagcgtacccttaggaatagccttgctcgggttcttcaaatcaccagacatacttgcacctctgatggccaattagtgaaatggggctgaaagtctgctgtcgccaacttacgcaaaaatacctcctgttgcaggaaatagaatgccaaaaaggtcttggaagttctctcgtccttttatttggcttcccgcggctcccttggttagatggggtttgagattccccatcagagttttcaaacgaattcccgtgaattccacgccctgacgggggactgggaaaggcttcatgaaaactgctgagagcggtatgctgaaagttgccacgagtagtatgaccaaaagcccgttgcttgccctcgcaaatatagaacttcctgccaagcaaaccccggtgcaaaataccaatataatagttccccataggtactgccaccaaaagccttcctccaggaagttggcccagtccccagactgcgccccaaagttctgggtaaaacagtccactaaaccaacggcattcatgccggtattgaacacatagccaagatagaatacaatgccaatagagccaccaaattcggggcccagagatctagaaataaggtagtaggcaccaccgcctcggaccgttccgtttgttgcaattgcggatagagacatcgttgtcacaaggttgattgtgtatgatataagtagcagcccttcgatgtatcagccgtggggtcctgactttgcgagaacctatgctcacctaatatgcccaagacaccagcttgtcccaggatgaatccgaaccgaaggaacataagaatgctcaggacattcaatgtcgtgggaacaaagacgccagagaaagtaccaagcttcttcggctcatccatcgatcgggatcgatgtccactcttgtccttcttatcggcgcgggcgtcacgaagggaatccgcagacaggtacacattttgtgaagtgttctcttcaccagtctcctgctcttgatcgccatcccctcggttatgccaccaccgagaaattttctggaagtaattcatgggtgaggaatggcgtcggccctcaattggttctgccgaattcacgggctcatacgggcgggcccatggagtcggtgaccagggtagcagtcgagtacgttcgtcggagttagcatggtccgagtcccccgggtcaagacgtgagacatcctcttgagcagttcgagtcgcgaaagttgggcgtcgacgggacaaggagtcggaggattctaaggctcgtttcgccatctcagttgcaaaatttatggtatgagcatgaggacataaacaacaaaataatctagataacagaagccaatagtcccagcaagactattgagtccgcagagacggcgctaatattaaatgaacgagaaggaaaaacaagcggtatcaatagatgacgttgataggtgcaaacagtttccagtttgcatcccgtcaaccgcacttaggagctgatcggccacggactgcttggcgctatttttgtgtctcaaatcctcctcagttacatcctagccttttcactcgaattcttctccgaggagctgactgcactattgctttaagcttccggccttcttttcatgcgcatttcccaggcctaaacaaggcatcctgctaggagctaacttgaccctgaggccaccttcaaaatggcggataatggcgagggtccatccctaaatccagctcgatctgtgccgatagcctcgtcctccgcgcgctcgaggtcccccgcacctgagttcggtagcagacaggcttccatggcacgcctcgcatccccagtgccctctccttcattaggaacgtccttgtcatcacgacagggtattccggccagccgacctgttacaaacaccaccaccgagcaggagttttccagatcgattgccaatccatcctcgatccccggtcctggacattctatccttgcatcccaactccaagaaagcctcggtcgttcgccgccgagatttggaactccgtcacgacacaacggatcccctgcggtgcattcgacgttagataaccgaccgttggcctctcagtatggctctttcgatactaaaaacggagtcgactcgtcgagcatagccccggtagaagaccctgaagttatcaagcggcatctggtcacggaacacacagataatcagtcggaaattgcgaccagccttggtggcgaagatactttctcgagtctgcagcttcaaggtggtgatattacacgacaagtttaccgttgggcggaggatgccgaagctgaagccgcagggcgattcttgcgcagcaagagtttcagcgtcagtcgaccaaggccggagacggatacggaagacattgacacaattcgggtaccaggagggtttcgcagggattacctacgaagagcagctggaagtccacaccgcggagatgcccacgggtcaaacgtagggccgccccatggacacggcgcacctcaactgccgactaccagcttcttggagttcttgactctctatggacactttgccggagaagaattggaggaagatgatgaggtactagggccggatgagtacttttcgtctgatgcctgggacgagccagatgatggcagagagtctggagaagacgcagcgctgttgccgcctgaaacaccgggtcggaagaagagaaagcacaagcaacgctcaccggtagggacaactaccacaacaggtgcagtactcttgctgctcaaatcctttgtaggtactggtattttgttcctacctcgagccttcctgaatggtggtatgctctttagtagcatggtgcttctgggagtctcgattctcagctattatgctttcattcttttggtcaatactcgcacgaagatcgaagggtccttcggtgacatcggtggcattctatacggcaagcacatgcgacgcatcattctcggatcaattgtcctgagtcaattaggctttgtggcagcgtacattgtcttcgtctcgcaaaatttgcaggcattcgtgctagctgtgagcaggtgcgcaacgttcattgacatcaagtacatggttttgttgcagctggtcatcttcctgcccctgtctttgattcgggacatcagcaaacttgggtttaccgccctgattgctgatgtcttcattcttttgggtctcctatatatctactactacgatatcagcactctggttgaccagggcggcatctcagatatcgtttccttcaatccaacaacctggtccatgttcatcggtaccgccatcttcacctacgaaggtatcggtctcatcattccgattcaagaatcaatgaagcagccaaacaggttccctggtgtcctggccggcgtcatggttctcattacctttatcttcctctctgccggtgccctgagctacgcggcgtatggatcggcaacgaaaaccgtcatccttcttaacctcccccaggatgacaaatttgtcaacgtggtccagttcctctattcacttgccatcctgctgagcactccgttgcagctcttccctgctatccgcattatggagaacgagcttttcacccgcagtggcaagtacaacccatatatcaagtggaagaagaacggcttccgtttcttcctggttatggtctgtgcccttatcgcctggtgtggtgcgaatgatctagacaagttcgtttcgctagtcggaagctttgcttgtgttccattgatctacgtatacccggtatgtcttatcatgtgtcctcctaatcaccacagaactgtatgactgactcagtatatcactgtagcccctcctgcacctacgcgcttgtgctgcctccaagcgccaggcggttgccgacgtaactcttgctgtcttcggcgccatatgctgcgtctatacgacgtacctgaccctcatgagctggatgggccctgacgtccctcaaagcccgggatactgtgactctctttgaaaaaaaaatctacattctatatcatgtagagcgtggcgagacaggttttgttgcattcctttgttctgtctcaaccctagactggcatgtctatcattgggttctcatatgttccttcaacgcatggacggaggtcatactagggacattattcacagtctcggtcaaactgtgagtatagtgggcgcattggtgtcagactaccctttctgtatacatactttcttggttttggatactatttactctaccatatttgtggagcttcctttagaagttcatctgaccgggaataaatcaaggataggacccagcctatcaccgaatcccgaagttgtcacggagttcatcctaaaaggaatatgattcgagcgcaacaatatagagcctatgtacagtgattgtcagcaaaccggaactagattgcagccagcgtcgatatctaagcgtctcccttaaaaccgcaggtcttcctctatatttctcctcttttattattggccggggctcatctggtctcatgacataaacccgcaggccatattggtaagaaggtgcaattctgcgaacgagacagatgctatagccccaatacaaactgaaaggaagcaagcacaaccaattccttctcggagacgattcttaagcaccagcctcggcagctgcgctgcccttagcagcctgctcggcgagctgcttttcccggcctccaaacctacaaagtaggaccaggttagtaatcacgattatagatgcttgtggacgatgacaaaagccaaacaaggtgttgggggatgaagcgtacttccagtagttcagataacggactgcctgagtaccctgggcagcgaagttggttacatggcatgcgaagaggaggtagttcttgggggtaacagcgagggagtagcgcatgaaggtggcagcgtagacgacgagggcaccggtcatggggccggagatgctgtgaagatagagctatcagtacaggttctctgagactcaacagccaaggatgagatggaagatgaaaggcgaagctcccattattcatcggataaaaacgtacatctcagcgtccttctgtgtgtccatcacggcggcaatggggataccgaagttggagacagggccccagaagtctagagagcatcataggttgtcagtaatttgtgcaattcatttacacttcatttctttagaaaattgcaagctcgaaggccgaaagcgtgtttctcccatcctcaacgtcgctttcagtgctcagtcggcgttggccgacctcgggacggcaatcgcgccgagagaaactggggtcaataatacgtacgggttgagcagacatagtccagcaccgagttagagcggatcttcgcgttaattgccttgatagcagccgccattgtgaaattgctgagagttatcacacaggattagattcggagaaggaaacgtcggtatctagaggatggggaagccgactcaccggctgtcggtgtcggcgatgtcacgtgcaatacattacattatcatctttgttgaaactgatgtattaatatataaactttgattgaattttagtggttatgtataatatggtagaatatggtagtccgaagctcaatttaagacaagtatcagagatatatatcggattgacctccacttcgaccatccaaaatctatttccatgttacgatctaaccaaatcatagagaggaaaacgacaactagttactgttagatataaaacgccaggctgtcacataggcctacatggccactagagtgcaaggaaggcccggtacgaagtatgttgggtagtttagatagcatatgatatagaagacacagcataatcgagagaggaagtggagatgaagaattgggatattaaacggttgaattgaagaggctcgtttaaaaagctagcacattttttttgacttaatgcgtaattcaagaggattttggtcttttttgtcccgttcctcgacacgacctccatccatgcgccgcaacgcctaacccagtagaactcagggtgatctagcctgtccgcgtatcgttatctctcgctggaggtgttgacaatggctattattctgcgccgagccgcccttgtttctttcggggtgaaatcagatcgtcgataatttgaagcatagaatactgcttcgtacatatttccaattacctgccaccgaatccaggaggggggtatccgcgtccctgaccgggaggctggaagccaggaggaggttggaaaccgggagctatgaaaatggaatatcagtatgggagacgggatgggacagttatctctgcgcaaacttacggggaccaccctgaggagcaaatccaggaggaggcgcgaaaccagctaggaagaaaccagtcagtttgagtctcagtcaacctaggaaaatgggagtatttacgaggtccaccgggggggcctccacgtccagcgaatccgggaggaggggcaccagggaaaccgccagggggaaatccaaagccacctgggggtgggggtccaccaatgccggctgcagggcctccgagtccgataggaaggccgcggccagcgggcttgctgataccagggcccgcggcaagagtggcagctgcgccgggtccggcggtgccaagtcgggcagaggggtcggcaggcggaggaccttcaacagagcaagagacgacttgagtaccgcgcacgatagttaggccgaggcttcgcttctcttccgcttcgaccagcggggcgtttgtgggaccggcagtgggcttagatttccgcttgatgcgacggaattcttctgtgtcggcaagaacaaggttcatgtgctagataacggaaagatcagctgggcgcctcggtttccaaagcgaagagaaataccttatcaaaggcaagcatggaaccagtcatttgacgtccatcgttcaatgttacgcgcatccggtagttaatctggaggagttagatacttcaatcgagtactgaaattgatttggaccagactgacaaggttttgctaaatgagagaagttagcgacagccattgaccaaacgggtttcgggggtgcaaatgggaatgagaaactcaccatcttgtgggaagccatgttggctatagagcgcgcacggatgcgacttaggagactgagtaatagagatcagtagaaagagaaagtttttctactgcggcggatgaagcaaaagtgcgagatcctcccaaggatgcgaagctcaagcttgtcaggtgctgccagttcttgatactggattacctaaaatatgagtcagcccaggttcgcaattttaatgcctcaggcagaatgcgggtcagaaatattaatgactaagcgcttaaattagactcattacctaagcagcaatcagggcttccaaatcacgtgtgggaacccacagtccacactttctctttttccgcgatcacttttgtctcctcagtcgacaaccacttcacgcccaaccgccgtcatggtacgttcagctccttgcaatccaaaccaagcattcccaatagaatgtattgttttatgtcattccatttgatatgggctgcaacctggacattttcgtcttgcgcgcacccaatcttcaattccctgaaatatctattctttgactagatacaccatccacaagttgagactaacatgatgcagtccgcccaagttgctaaggccgagaacccctgccgatcccttcgcttgtcgaagttggtcctgaacatctccgtcggagagtccggtgatagactcactcgtgccgccaaggttctcgagcagctgtccggtcagacccccgtctacagcaaggcccgttacaccgtccgtaccttcggtatccgccgtaacgaaaagatctccgtccacgtcaccatccgcggcgccaaggctgaggagatcctcgagcgtggcctcaaggtcaaggagtacgagctccgcaagcgcaacttctctgagaccggtaactttggattcggtatcagcgagcacatcgatctcggtatcaagtacgatcccggcattggtatctacggcatggacttcttcgtctgcatgtgagtttcttactgatcaccggatttggaggcaatttatctcggatattaacaaataattccagggaccgccccggtgcccgtgttgccaagcgccgtcgctgccagtccaagatcggtgtcaaccaccgcatcaccacctccgagaccatgaagtggtacaagaccaagtacgatggaattatccgttaagtctcaaaatcagagataatggctgggtagggcctgtgaagtacgaggtactcgacaagaaccaaaaaattatcccgagtactcgaggaaacaaaatttgtggacgggcaccccactgccagtcggcgggcccctttgatctctgcatccaacaatggtcttgattttgtactccggcaaccaggataggcgtgggagagacatgaattgattattacctttttactgctgcttttcccttttcacaatgaggcttcacgagaggtgatgttttccgcataaccattgttgaattggatggcggacgctgggtttcgacctagtgtctagccaagactcgcttgagaatgcctcataggcttcgtcaaagagtcggtctcttttccagcgagaattttctcgtggtggattgagtaccttgttctggcctatcttgtctgtccttatcctatcctcgtaggtgcaatttgcctggcatagaagtaaatcaaccagtcgtagcttgtagattgacaatatggtcctccgatctgtcgggaatgccgacataggactgtccacgcttatacaatcatactttgtggccgcttcgacaacagccttttctacagggtggtctggcctatcctcgaccataaattgggccataatggcgcgaactggccatctcgccatatattttgttatgtgtatcaaccgaacctgctaatttctacaacctaggcaattaacatgtcccgctggtcgatccccgcgtcttttaagtccggtccacgtacgacttgccgagtagctcgtctcttcaatgtacatcagtcaattatgaggcttttatagaaatacaagaagccactagaatttatcttttgtatggatgcccatgtacaaacattgagtaaagcccgtatatcgtgaccataatgttgaatgttaggaatatatcttgattctaagagtttagtaactagttacctagccagtcaattatttatttgtttggaagaaaaccttttgattactatcctagggttgaaaattgccactactcttattttaaacatcgattatctgtaaataaacagtctggagcatatacaatcaaggaccatgtatggtatgctagctttatttcctctccaagtaacactgtgtggttgaggtataagtacaaaatgtacattctagtttacgtgtttcacgttggaccatgcgaagagccaggtatagtgtcatttcattctctcttattgttcttttgttgtccttgacgtaaatgataatgtaaagtatccagggaagatatagaatatagtaggtgtaagcctatatattgcacttcccagcatggcgaaaggaccagaaatcaccaccactaagactgaatttacaattttttatccaccatctcaatattctcgctactcaactcatgtttatcttcacctgcttccagatccatggttttggcatcggcagcctcatcaactccagccacaacactttcgaaccggcgaccacgtttctcaggaccaatagcagtagtgatcatgataccgagagcaatgatggcagttgccactgccatcacaggcccataggcctcaacacgatggcctgttgtactagtaataaaggtagactcggagactgcgtttataatctgcgaagatggcgaggaaatcatatttccaatctggtatgtcagacccgtgaacgaagagcggaacgctgggggagatagttcggctagatgaacgggaatgacgccccatgctccctgaatgaagaattgcatgaagaatcctgtcacactcagagacctctcgccttctgggaggatccatgccgggatgaggactccagatgccaaggcggcgacgatgattgctcggcgacgaccaaagaactgggataggtagccgatgatggttccgcccacacaggctcctgtcttcatcagaatagaagcccgtgaggcgccttcgttatcaagctcctttgcagtgagcatgaatgtggtgtacgaatcttgggatgtgtgggaatagaaattgaactaacgcgggacaaattagacaaatgctgataggagccggaatagcggttatgacatacccaggtcatgagaatgacacagtagatgcacatgcgccactccttgcccaacatgcttactgtttcacgccaaaactcgcctgcattcattgttcgcttgccggatttcctggcttcgatgaaggactgcgactcggggaagcagatgcgaatgaggccaattgcaattgagataccggctgcacaggaatgattgttagtgacaggtaaacagtattcgatggaatagtagactgacctgcaatccagaatacggtcttccaagtatctgttccaccgccaacaccaaggttggcacatgctgcaaatacatatcctagtgaatacccttgttgaaggattccagacataagacctcttgcgttgacactggttcacaagatgatcagcaaaagtcactcagccctggatgataatactcacgggcaatgttccaaagccatcgaaatagcatttccgtaaacgccacccatgaaaagaccaaagagacttcgcacagccaagaactgctggaaggtcttactataaatggtggcgatttgcaagattcccagaataatcatattgagcaccatgggccatttacgaccatatttgtcacctgccagtccaaagaatgcagctcctatacttcgcagcagcagagtcagagtaatggcagtcgtaatatctgttttggacttgtcgtagtatttcgccagctttactgtctggatggagagggcatggaagtcaaatgcatcagcagtccaggcagcgagtcccaccagaaagaacacccagtctcgagccgaaagctgcgccatcagactgaaggggttcttgataggctctggggattgccattctgcgtatgactctccgtgttcgttggtcacctcgacacgttgcttccagatgaagagatctccgatggactgacgtgctgtggcgagcataccatcaggaatggggtctgccctttcattggaagatgccattatggcgatctatcaagagaaggagacgagaaaaaaagaacgaaaggtcagaagacagaagaagcaggcaagtcaagctgaccaatagaaaaaccagatcactttgaacaaagcggactgactagaaaatttggtagtagactttgtgggattcttctggaaaatctgtggcatatccctttcaatttatatgtcggcgctcgccattttataggtacacaccgcgttgtcccccgcatctccatcccgcatttcccccgtgtcggaaaataacaaatgccgctgcaccccaggatgcccgagtttcggactgataaaatgccactccgctggtgagccaagcggatgccaagggcttggaagcaccgtgcctccaatgccaggacaggacatgagcaacagaccgcaccacacactttacggctggcttggcgtggagatgaacttgaccagaggtcgttccggacttggctctgcccacatagacaagcaccagtaagccgcgtggcgctgtgcgcgtggtcattgatcggttacgccgagaaccttgagtgaaaaatgggccgataggaattccagtgcctccggtttggtctttaatgtcagtttacggcgaagggcatcggaatatagcttccttcggggctctagtgggctctagtgggctattagcagtcggttatattgtcttggtctggggaagtgtgttgggggcccactaaagctggtgtaatagttagctcacttcatatgtagtttttttcatcttcaaaaatcagaacaaataaatctgtaacgcatactgaacgtacagattgaggaaggactaaagggacataagcgctgctcacacgtgataacttccgaagaatcgaggcgcaatggtaatactggttagatggcaggatccgctagagtggaactagttagttaaatgggccaatcaatccctaatcctgaatctcctgagttcgaaagtcttggctttagccgcgagaggctacaacttgctgagcttggtcaagggtaaaatgggctggacatgcacatcccttgcgttcagggtccatggtttaagggccagcttatattttcatgtaggcgtccacagcttgcatttggagaaattgggtctccttagaattagtgatatatgttcagagggtacggagtactatttgacttgaaaactcagagaacgtggccaggcgggtgagtggtaagaggctagagccacctacgtgttggtaaacattgtgaaggcggtcagttatacctctaacataggtagagatatgaacttgagctgacagcatacactctcaggttaatttgacaaacgagatatcaatgagtttgctacctaactttcactttgctctctctttctttttctttcctacctacaaacactgcatctgaaagagacgatccagtaagcccccgtgtcacgtgatcatccataagcgacacctcagcaacgacggcagcggcctcctgaggtcacttccgcatctaccagatctctacccccctcctcctctcttcatacatcttcttcttcttttcctatttcgtgctcccgacaatcgcatttcatcaccctttttcatcatacttcaattcttttgcctttgcgtggcgtttcattcagcggactaggtcgtactgcggcctacgtaaatatggcacctctccctatcaagttcacagagctggtcaatgtacgtgcctacccctcatctctatcctataactattgaagctttgaagctgacctgcgcctgaattgtacagttgacctctgtcggcattgcggtatgtacaaccaaccatgatcttcgtcgagctttgagacggatgcaccggccgcgcatcgcaatattcctggatatgttaggattgctactaactgttatgcttacagccggcatcaattggcttcacttcatgtgtaagttgtctaatgtcaccttgcgactgaccctcaaaacatggatgacaaggcccggctaacttgacattctttcgctttagacactagaatctgatcactacgtctgtgttcgccaaaagctagacgatgatgccaaaccagaggtcatcattatcgacctcaagaacaacaatgaagttctacgacgcccgatcaacgccgacagtgcgatcatgcattggagcaagaacatcattgccttgaaggctcagggccgtaccattcagatcttcgaccttggcgcgcggcaaaagctaaagtcagcgaatatgaatgaagatattgtctactggaagtggttcagcgaaagatccctcggtttggtcaccgactcagcagtttatcactgggatgtctacgatgccacacagcagaaccctgtcaaggtgttcgaccggcttccaaatcttgcggtatgtgatttgccacgtggatacaacaatggaagcccggtatgctaacttgcgtctactctttagggatgccaaattatcaactaccgcgtcaatgccgaggagaagtggatggtcgtggtcggtattagccagcagcagggccgggtcgtcggatcgatgcagctttactcaaaggagcgcggaatctctcagtttatcgaaggtcacgccgcctctttcgctagcattaccgtcgagggctcccccctacctcacagcctcttcactttcgccgttcgtacccaaacgggtgccaagctgcaaatcgccgaaattgaccaccaagaacccaaccctcgcttccagaagaaggccgtcgaggtgtacttcccgcaagaggcggtcaatgatttccccgtcgcaatgcaggtgtctagcaagtacgatgtggtctacctcgttacgaaatatggcttcatccacctttacgatctcgagactggtacttgtatcttcatgaaccgcatctccagtgaaacgatcttcaccacgactccggattccgagggagccggtctggttggtgtgaatcgcaagggccaagtcctggccgtcagcgtcgacgaaacgaatatcatccagtacctcatggagaaccccgccatgtccggtctcgctatcaaacttgcctcgaaggctggccttccaggtgcagatcacctgtaccagcagcaatttgactctctcatggcctcgcaggattacgccgcagccgccaagattgctgccaactctccccggggtttcctccgcactctggaaacaatcaaccgtttcaagagcgctcctcaaaccggtcagatgtcggtgatcttgcagtactttggtatgctgctagacaagggttcgcttaacaagtacgaaagtgttgagcttgtccgacccgtcttgcagcagaaccgtaagcacctgcttgagaaatggatgcaggagaagaagctggagagctcagaggagctcggtgacattattcggccatacgacatgtctcttgctctgactgtttatctcgaagctaatgttcctaacaaggttgttgctggattcgcggagactggtcagttcgacaagattcttgcatactccaagcaagttggataccagccagactacacccagctgcttcagcacattgttcgtgtaaaccccgagaagggcgccgagtttgctactcaactcgccaatgaagaaaacggtgcattggtggaccttgaccgcgttgtcgacgtgttcctgtcacagaacatgatccagcaggccacctcgttcctcctggacgctcttaaggacaacaagcctgagcatggccacctgcagactcgtcttctggagatgaacctcgtcaacgccccccaggtcgcagacgccatcctcgggaacgagattttcacacacttcgaccgtccgcgtatcgcccagctttgtgagaatgccggtctcatccagcgtgctttggagaactcggatgatccagctgtcatcaagcgcaacattgttcgcaccgacaagctgagccccgagtggctaatgagctacttcggtcgtttgtctgtggagcagactctcgactgcatggacaccatgctggaatcgaacattcgccagaacctgcagtctgtggttcagattgcgaccaagttctccgatcttctcggttctaaccgtctgatcgatcttttcgagaaataccgcactgccgagggtctttactactacttaggaagcattgtcaacctcagcgaggaccctgaagtgcacttcaagtacatcgaggctgccaccgccatgaaccaggtcactgaggttgagcgtatttgccgtgagagtaactactacaaccccgagaaggtgaagaacttcctaaaggaagcccgcctgacagagcagctccccctgatcatcgtttgtgatcgtttcaactttattcacgatctggtcctgtacctctaccagaatcaacagttcaagtcgatcgaggtctatgtccagcgcgtcaaccctggtcgcgcccctgctgttgttggtggcttgctcgacgttgactgtgaggagagcatcatcaagaatctgctttcgactgttgacccagccgttatccctatcgatgaactcgttactgaggtcgagagccgaaaccgcctcaagttgctcctgcctttcctcgaggccactctggccactggaaaccagcagcaagctgtctacaacgctctcgcgaagatctacattgacagcaataacgacccagagaagttcctcaaggagaacgaccagtacgacactctcattgtcggaaagtactgcgagaaacgtgatcccaacttggcgtacattgcctacagcaagggccagaacgacctggagctcattagcatcaccaatgagaactccatgttccgtgcccaagctcgttacctcgttgagcgtgccgatcctgagatctgggcctttgtcctcagcgagaacaatgaaggccggcgttctcttgtagaccaggtcatcgccaccgcggtccccgagtctaccgaacccgagaaggtatctgtcgccgtcaagtcgttccttgatgcggacctgcctggcgagctgattgagctgctagaaaagatcattctggagccctctcctttcagtgataacaccagcttgcagaacctcttgatgttgactgctgccaaggctgacaagggtcgtctgatggactacattcacaagctcaacgagttctccgccgatgagattgctgagatgtgtaccagcgttggtctgtacgaggaagcctttgaaatctacaagaaggtcaataactacctggccgccgtcaacgtgcttgtggagaacattgtcagcatcgaccgagctcaagagttcgctgagcgtgtcgagctgtccgacgtttggagcaaggttgccaaggctcaacttgatggtcttcgtgtgactgactcaattgagtcctacatccgtgccgaggacccgtctaattaccacgaggtgattgagattgcaacccatgcaggcaaggacgaggatctcgtcaagttccttcgcatggcgcgcaagaccctgcgtgaaccggctattgatactgctcttgctttctgctttgcccgtttggaccagcttgctgagctcgaggacttccttcgcactaccaatgtagcggatattgaagcctccggtgacaaggcttatgctgaaggcttccaccatgctgctaagattttcttcaccaacatctctaactgggctaagttggcgactaccttggttcacctggaggactatcaagctgcagtggagtgtgcccgcaaggccaacagcgtcaaggtctggaagcaggtcaacgaggcctgtgtcgagaagaaggaattccgtcttgcccagatttgcggtctcaacctgattgttcacgccgaagagctgcagagccttgttcgccagtacgaacgcaatggatacttcgacgaactgatcgctgtcttggaggcaggtcttggtctcgagcgggcccacatgggtatgttcaccgagcttggcattgctttgtccaagtaccacccagaccgtgtcatggagcacctgaagctcttctggtctcgcatcaacatccccaagatgatccgggcctccgaggaagccaatctctggccggagctggtgttcttgtattgtcactacgatgagtgggacaacgccgctctcgccatgatggagcgtgcagccgatgcctgggaacaccactcgttcaaggacattgttgtcaaggttgccaacctggagatctactaccgcgcgctgaacttctaccttcaggagcagccccttctgctcactgacttgcttcaggttctgaccgctcgtatcgacgttaaccgtgttgttcgtatcttccagagctctgacaatattcctctgatcaagcctttcctgctcaatgttcagtcccagaacaagcgggctgtcaacgacgccattaacgagcttctaattgaagaggaggaccacaagctgctcaaggactctgttgaccagaatgacaactttgatgctgtggctctcgcccagcgcctggagaagcatgacctcattttcttccgccagattgcggccaacatttaccgcaacaacaagcgctgggagaagtcgatcgcgctctccaagcaggacaagctctacaaagatgctattgagaccgccgctatctctgctaaggccgatgttgtagaggatcttctccgctacgtaagtttgctatgtctgtcattgctcgagactttactaattttaactagttcgtcgatattgggagccgcgaatgctacgttggcatgctttatgcctgctacgacctcatccgccccgatgtcatcatggagatctcatggcgcaagggtcttcatgacttcacaatgcccttcatgatcaacttcctctgcgaacagacccgatcgatcgagatgctcaagaaggacaacgaggagcgcaagaaccgggagaagacaactcgaacagaggaggacaacactcccatcttgcagggctcgcggctcatgctgacacagggccctcaatcaaacggcgccggtctcacaccccaggcaactgggtatcgtggattctagaaccgtgcaccgtttttgcttttgattctccgtttctcttgcatttgtaacatacagcggatgtgatgctttgaggttgcaaaaggaacgatttcatatgggggatggttacgccaagagcgtgccataggaggaactcatgacagcccattaatcttgctttttgatttttttttcttcgccgcatgtatttgacaagcttccgtttttcccatgcttttaacagtctgggccatggcccgatattcagtaatagcattgcgatttcccacgttattttattctcaccgcagtaccgtcagttattccctttcccccacagtcccgagcctgccaagcgtctgcccaggcggatccattcgagcttcagggtcttcggtgaggaatgtagcatcgccaagacacgatggcaaatcatctgcaactatgttcccccatgggattgaaggtgagtcttcctgcagatcactcactgccttgtcagcttttagctttgcccatggggtgcggtggtagattagtattggacggttgtatgagatgctgtaccgtccccactcttcttacacgtcggctcgaacaagtaagcataatccactccgtacttttctttttttaggctttgagttacctacggaactactgaggtatacaatgtaaaacacagggtttcacagttccgacgagcccagcctgccgaattccccctcggcccggacagatggaaacgctcaattccaccggcggagacttggcacctaacgcggggaagaatcttacagccagcaagggttactggtggaaagaagggagtagatccctccgtcggggatgcgatatcatgcagaagtgtaaccagaacagaccagggttgatcctgatgaatccatgccaacggcttggacaaacttccaaggtgggggctggtggtagaggagtgcctcgggcggtgggtttccgtcgggattgcgagtccatgcagaagtgtgaaggggttgacgccaatggctcgggggaaattccaggttggatgctgatagataagcgctgccagcggtgattgcccagctctcatctctaaagcggaagcttatcagccaagagaagagaagagcaagggtgttgcaagtttctctgggcactgcaagaataaggtagaccaaggtagatcaggtttgcatttctcctggcttatggtgccaacaatggaagagctcggggtgttcagagcacccttgacacggtgggaataccaatggcgttggcatgtcgcgttcttgcgtaagatccaccagatagtcgtacctgtcatactccgtacaagcgggagatcccccgggagtgccaagtggaatggttatgagattgaattcgggatgaggtgaggaggggcgcttaatagtggagaggagccgtaccggtcgtaccgacacaaatcaaatatcgtcataggattcataggatcccctatcggcccgccaatcctttttaaaatcgttttagtggacgcatgaccggttggagatttccaatcttttcaatggaaccctggaaccttggaaccttggaaatgtctggacatgagtcagatcgacccctcctatctaaccttcatacatggaggtcggtggtgaaattatgtcgatatcgactcggccacttctcccctaggagacagagaggggaccctgtgtccatcgaattggcccgatccacttctcgctctgcacatgtgtttgtcgagagttctccgagtctcctccggccttttccctcgtctagttcccgcgaatatccgtacagttgggagttgaaggatcaagggcttcgtgttgttccctagatgctgacgttgatcccgatggcccgaggtagattggcggaataagttacctaaactacccgaagttatcgtgcgaggattatgagttatcgtgcgagaggaatcgtccggggtaagttgggaatgggaatgggaataataggaacattggttgtagctagggttagtatagttcctttatgggtatagatggtaagccccgcatagatttcgttatgcttttagcaaattacatttctcgaattggatatattcgattattgggttatcctattcttattatcctattattatcctattcgatttgatcattcccaatttctaggcattggtcccggtgtaccggtgaacctgtatgtacttgttacctcattcctggagtcaatcctcgcgtctcggcaagtacctgtgacttggtagatcacacttctgattcccctctttatctaacccccctcccacctcccaaccttcttgtcctctctttttcttcccccccttgtctttctatttcaccctttaaatactatcctatccaatttctatacagcttccattgcttatactgaagcacagtgcgagcgattgtgcagtgatctgccgaaaccggcctcaaattggacggagagctcccccagcttcttatagtgagtcaccgcctctgctttccataccggacctccggaggaagctctagagtcgaacctcacctaattcactcctttcaagtaaacaaacccttgtaaccgatctctcatctcgtcacatacattcacaatggctgccccgctccgccagacggataaggcggttgatgagtccgacatcctcgaggatcacaatgagcaccaccaggactcagtccaccgtcgtctgcgggccaactcgactattatgcacttcaaaaagattctggtcgccaaccgtggtgaaattcccatccgtatcttccgtaccgcacacgaactgtccctccagacggtcgcagtcttctcacacgaagatcgtctctcaatgcatcgccaaaaggccgatgaggcttacatgatcggccaccgaggccaatatacccccgtgggggcttatctggccggcgatgagatcatcaagatcgccctggagcacggcgtccagctgatccaccccggttacggtttcctttcagagaacgcagactttgcccggagcgtcgagaaagctggcattgtgttcgtcggccctaccgccgaaacgattgatgcccttggcgacaaggtttctgcccgcagcgccgctatcaagtgcaatgtccccgttgtcccgggaacccctggtcccgttgagcgctttgaagaggtcaagaccttcactgataaatttggcttccccatcatcattaaggctgcctttggtggtggtggtcgtggtatgcgtgttgttcgtgatcagtccgagctgagtgacgctttcgagcgtgctacctccgaggcccgcaccgccttcggtaacggtaccgtcttcgtcgagcgtttccttgaccagcctaagcacatcgaggttcagcttctcggtgataaccagggcaatgttgtccacctcttcgagcgtgattgctccgtccagcgtcgccaccagaaggtcgttgagattgctcctgccaaggaccttccgaccgatgttcgtgatagaatcttgtctgatgccgtgaaactggccaagtcagttcggtaccgcaacgctggtaccgctgagttccttgtctgtggcaatgagcactacttcatcgagatcaaccccagaattcaagtcgagcacactattaccgaggaaatcaccggtatcgatcttgtggccgcgcagatccagattgctgcgggtgcaacccttgaacaacttggacttacccaggaccgcatctctacccgtggtttcgccattcagtgccgtatcactactgaggaccccgccaagggcttctcccccgacaccggtaagatcgaggtttaccgctctgctggtggtaacggagtccgtttggacggtggtaacggcttcgctggtgccattattagccctcactacgactctatgctggtcaagtgcacttgccgtggctcaacctacgagattgtccgccgcaagatgctgcgtgctttggttgagttccgtatccgcggtgtcaagaccaacattcctttcctggcttcgctgctgagtcaccccacattcatcgatggtacttgctggactacgttcatcgatgacacccccgagctgtttaccctcgttggcagccagaaccgtgcccagaagctgctcgcttacttgggtgacgttgctgtcaacggtagcagcatcaagggccagatcggtgagcccaaattcaagggcgagatcatcaggcccgttctcacggatgctgcgggcaagcccattgacatctccaccccctgcactgagggctggaagcagatcttggacaaggaaggccctgcgggcttcgctcgcgccgtgcgcgctaacaagggctgcttgatcatggacaccacctggcgtgatgcccaccagtcgttgcttgccacccgtgtgcgaacaattgatatgctgaacatcgctgctgagaccagctacgcattgagcaacgcttactcgctcgagtgctggggtggagccaccttcgatgtggctatgcgcttcctctatgaagatccttgggacagacttcgcaagatgcgcaaggccgtccccaacatccccttccagatgttgctgcgtggcgccaacggtgttgcctactcttcccttcctgataacgctatctaccacttctgtaagcaggcgaagaagtatggtgtcgatatcttccgtgtcttcgatgccctgaacgatattgaccagctcgaggtcggtattaaggccgtccacgaagccggtggtgtcgttgaggccaccatgtgttacagtggtgacatgctgaaccccaagaagaagtacagcttgaagtactacctggatttggtggacaagatcgtcaagatgggtcctcacgttcttggaatcaaggatatggctggtgtgcttaagccccaggccgcccgtctgctgatcggttccatccgcgagcgctaccccgatctccccatccacgtccacacccacgactctgccggaaccggtgtcgcctccatgattgcctgtgccgaggccggtgctgatgccgtggatgccgctaccgacagtctgtctggtatgacctcgcagcccagcattggtgctcttcttgcttcgctgcagggtacccagtacgaccccaagttggatttgtcccacgtccgcgctctggacagctactgggctcagcttcgtctgctctactctcccttcgaggccggtctgaccggccctnnnnnnnnnnnnnnnnnnnnnnnnnnnnnnnnnnnnnnnnnnnnnnnnnnnnnnnnnnnnnnnnnnnnnnnnnnnnnnnnnnnnnnnnnnnnnnnnnnnnnnnnnnnnnnnnnnnnnnnnnnnnnnnnnnnnnnnnnnnnnnnnnnnnnnnnnnnnnnnnnnnnnnnnnnnnnnnnnnnnnnnnnnnnnnnnnnnnnnnnnnnnnnnnnnnnnnnnnnnnnnnnnnnccgctgaccccgaggtctatgagcacgagatccccggtggtcagttgaccaacctgatcttccaggccagccagttgggtctcggacagcagtgggctgagaccaagaaggcgtatgaggttgctaacgagttgctgggcgacatcgtcaaggttaccccctcctccaaggtctgtggtgacttcgcctcctggatcgtcagcaacaagctgtccgcccaggatgtgctcgaccgtgctgatcaactcgacttccctgaatcagtcttggagttcttcgaaggtctgatgggccagccttacggtggcttccccgagcccctgcgtaccaaggccttgcgcggccgtcgcaagctcgacaagcgccccggtctctacttggaacccatcgacctcatcaagatcaagaacgatatccgcgagaagtacggcgcggccaccgagtgcgatgtcgccagttacgccatgtaccccaaggtgtttgaggattaccgcaagttcgtggccaagtatggtgatctgtccgttctgccgacgcgctacttccttgccaagcccgagatcggcgaggagttccatgtcgagctggagcaaggtaaagtcctgatcctcaagttgctcgccattggtcctctctccgagcagactggtcagcgtgaggtcttctacgaggtcaacggtgaagtccgccaggtcagtgttgatgacaacaacgcctcgatcgagaacctcgcccgcgccaaggccgaccccacggatagcagccaggttggcgctcccatgagcggtgtcgtggttgagatccgcatcaccgatggccacgaggccaagaagggtgatcctattgcggtgctgagcgccatgaagatggtatgttgttatttcttttctattacatataatttgtggctaactcccctctaggaaatggtaatctccgccccgcacagcggaaaggtgtccaacctccaagtcaaggagggcgactccgttgatggccaggacctgatctgcaaaatcagcaaggcgtaaaagcatagcgactctgtactacgaaccatgcacaatttgtgatgcgtggtgtgatttgaatgttttctcagcgtctttagtttatgtttttcgagttcatatctgaatttaggtttattcggaatcaaacagtatttctgttcaaccatttgaaagttcttagtacattcacttgtaggtctattcccacgcttctccccattctcccgtctttctcccgagaacggctttgaaaaattcgtcaatttacggctcaggttgataactatacatttctttggtataaatcttcttgtttctctgtgctggatataataggcagcaggatagagcactcagagcactgttctagccacctgtacggtcataagtacttatctatctatctaggaaattaataccccggccatcgtgcgggtcaatttctccccactataagaacgtcggcacatccacatctataccccaactaccccaaatcaaccatcaacagaacataatcgaaatacaagatggaaaccatccgccgtacttatctcaaatccctcgctcatcgcggcataatccaaggcgtaacaatttcgacattgtcttctcccagccaagccaaagacctctgccactacttcggcggtgtccgctacggccttgcccccgccgagcgctggcgccgtgcccagcccctacccgcatctttcacctacggcagcggagaagcgccaggccaatgtgatgggggtgcagggctttgtcctcaaccaggttttttgaatatctcgcctgagaatccggatgcgtggaacgaggattgctttcagtgtaatgtttggacgcccattggagaggcgcctgaggggggatggcctgtttttgtttttattcgtgagtatcttctgatcagacataggatatatagtttcagacttggaatagggcaacaggcttctataaagatcgtgctgactggtgttgtccgacgcagatggcggatggcttcaattcggctcgcctaattcattcaatgtggctgcattgatcggcgaggccgacttcgactgtgtggttgtgatgcctgcgtaccgggtcaacttattcggattcctctactcagcagaattggaggaggatgcagctactgtcggagagacagttgggaaccacggattctgggatcagagattagcattagagtggacgaaggagaatatccagctcttcggcggcaatccggatctcatcacgatccacgatctcaggatattccgcaggcgccaactccgtcttccaccaactagcctatgacctccgccaaccagacgagaattctctcatccgccaagcctgcatctggtcaaacagcccagccgtccagccaaagcagccaaccgaaacacaaacccaattcaaccaactcctaacagccttggacatccccctcactctgccacatagcgagaaacttacccgcctacgctcaacccccgcaaaaaccctcctcgacaaagcaagaacaatccagctccaccaattccgcccaacaacagacacatccttcatctccccgtccctcttcacgaccctcgacaacggcgccttcgcccgcagcctcctagcccgcaacatccgcatcataataggtgaatgtcgcgacgagcgcttcctttacagcacatggttcccgccgacagacaacacgctctccgcgctgcgcacccgtctcgtggcagattaccccgaacacatcgtcgacgccgtcatcccgatatattacccggacggctgtctaccgacgaactgcaagaactgggaccaggacgcgtgggggaggatctacgctgatatgcaggtgcatcagatgcagcgtgggcttgtgtatgcgctgacggagaatgaggccggggttgatgcttcggcgttgctgtttcggtatcggattgagtggcgggcgaagtgtgtagagaagactttgccggttgagtggggggttacgcattcgtcggattatccgatttggttctttgggaatggtgggttgttggaggaggaggagaagagggttgtcagggaagggcttgttgggccgctagaaaggtttgcttgtggggagaaggaattcggatggggggtttctgggaccaagggcgttaggacgttgaggggggatgggagtgttaagattgtggaggatgcggattgggaggagggtgttagggtttggaagggtttgagagatgctgatgagaggttggtgtgatacctacaggtacatagttacatacgtagttatgaggtgcaagtatagacgccacggaggatataccggataccctaaatataggtagcttcgaccttgatatctttcaaactatatgccaagctttccccgcattccaactacgtcaaggctctccggggtacatcatagcttatcagtctattacaaagcacagtacatggcgtagtgaaatacctgtagtgcatggccatacccaatagtacaggtactggatataataagtaccagtcttgaccttggtaacggaactagaccagtccaaattcaatcagcagacggtgattcaccacctgtaacgtagtaagctgagtatgctcttataggccatcttcccccctctggccttggattatctcttcctactcagtttaattaattcaagctaatctgcgagaacattgaggtatgttccattttaattctcacctattctatatcccatctatccccaaagggcaacctgaacaagaatgacgtcgtcgattcccaacccttaagagacatcatgattagtatttccttggtttctttagaattccatgctctcactcttactatactaaattcccccagaagaactacaaaccattacggactataccagctgtctagacatctccaacatgtctgacgacacccgccgcaactggcacggaagccccggtgaccgtctcgagcactctaatgtctggatgagtggcggtgccaagagccctaccggtcgtgctgcgtgggcgatgcctataacgaacaataggagggtatgtcatttgcctcttgtggatttctattatatatcgtccattccccttagcactacatcatctatccatccataacacatctccaaaaccaacctaacatccaaaatgaaggactccgacacatccacatccacctcgaacggaaaaccagccgaaggagatacacctaaccccccaggcttaggtgagcgtcgccgcagctcggccggctccaacggcctcttctcgaatctgcacacacagaagcgtgaatctacaaacgcggacatggctatccgccgcgcgagctggaatgaacaggctgctaagggaggcatgttctcgaagtggtgggagggatacactcggggcacttgaagcaattgtttttgaacttggatcttttgcgtgggcatttgtatactcgatatcgggggttggttctggagatgagaaaaaaaaagaaaaaaagaggaatactggtattgggttttgatttagttcggtgcttgtaggcgtgtgaatttcatgatcactcttaattgtttctttgattttctttgatccaggctctccttgtgtctttctctacaaggagatactcgacgtacctgagactgctcctttaaatgtaaggtactgcatctgatccaacactgtcttttctacctctaatccatgaccggcacttgaaataaaacgactgctattgctaattcgagacatacatttacaagcctaacataacatccagcagagtatgacagagtcctcataaatggaaccaacaactactctggctgcaaatatgaacacggatttcacatcattggactgggagctccaaagcccaatttggcaatacctcatcccatggttgtctcccaacctttctcaatcataacatcaacccaataagtatcatcgtccccagcatccaacctcctccatacttcattaaccaacttcaagcatatatgaatcggttttggcggcagaacgtgcaagaaggacgttaaacggccaaggatgaacttgcgcgtgcgcgagacttcaatggcctccattgagatggtaggtgtctgattcgggttgtaactatctttatccctgccctctggataatcttcgccattccgggcttgagtgccagcatttgtggccagacgcgggagacggagctctgagcaggacgccactaggagaaatggctggaggcagcgggtacgtgattccaggggtatggtttttaatcgagagagggttgtcacggcgaactcggtgagccagttgctatataggatttcgggggtcggagattgttgggtatctggtgatgacggagatggtagattgtgagaggaagatcttcgagacggcgaagcagcggtacgttgagacttggtgttttgtcctgttgctggactaggacccccgaatctagctgacaggtccatgctgtcgaggtcaatggggaagaatgggtcgcgggatgctgcatcggcgttgtcagggtattgggatgttgtggatattggggtgggcaggcgtttgtgcagtaggtctgggaatacgcggtataactgcatgagaccgacgcatcgatatgcttcggccattgtcaggaggtgccatactggggtatcgtcgtcaccaggactgacaatctcggcctccgagggatgagcgaggcctaggaggcgttcttctagctcgcgggctttctcgattgccaactgggcacgggtgatatcatcttgggaggtgaatcgccttgagcggatgcgttttcgctcacggcggatgagttgcccgacctcgtgcacggtgaactgggtgtcgcgcgcgatgccggtccatgggtgcgggacccgttgtagaacgaaggactcgccaatagacgaagcggtccgtgaattgttagataggaccatcgtgtcattgtctgcgacgaaggaaagcagcatctcccagtagatgagagcttcctcgaagaaccggtaattattgctgtcgttcttaggtaagctgaagctagagccgttcgatggtgaagagatggtattgagctgcttgcggagcaggttgaaaaatgatatacccaagtcatttgggtcgtgccaactagccgtttgtccgagcattagcagcgccagcaaagacttgtcgtctatcactgcttcgcgcgtgattatatcaacagcttcatcacgcatccttcggcccatgggaccgaactgaggaaattcggtgaccagtgttgcagcagccatgctttgcattgttcgacacattgccagtgaagatccccaaagacgggataccgtggttcggaaggggttcatctggctgtcgtaactagagaacagtcctgccacttctttgaaatagtactcgatcaaagtccatgatggattattcagtggacgagatatggacatgaagttatgtgatgaggggcggtgcgatgcaggaggataactgcgcacaatggtcgaaggtgagaagtcgcggtaaacatcattctgttcctcactttgcgttggtccaatacgcgacagaaagtgtgacaggtctacaccgatattttctgacacttcaaagtcacggaaagtgtctctttggtgtgtgaaagacggcgatgccggcatcggggacggtgagcatagatccgtcagttcgggtaaagacccatggctcggatgttcccatagattgtcacatagagaagttcggctatctaagacgaaatttggaggatccggttcatgcgtctcaaatgttgaatcctccggcaaagcatcgtcgatttgggttaccggctggctaggaccaggcgaggcagaagccgcaggacttggtgttctcacctccgagatcgatgcgggtacggtgggactagactgctcatacttggtaacccagcgcagggattgtgcataaccaggacaccggacgcccaagcgagtgcagcgagtgcagtgaggtttctcttcgccgcatttgacctttgcatgttagtgatatccgaacgggcggggacgggaaacacaaacccgtttactcttgcatcttgcacagccatttctagatttcttaacgcggcgcattataaagcataaagaggatgaatctgaggagatccggcaacattcaagatgcggagtataggctgagggggaaaatcgttgagaatcggggcttatctcgataaacgggattcttttgcccctttgggcaggtgaaacaagagaaatgacgatgtctgatttgatgactgtataccatatggaagactacgcgaggcatctacatagtacaagtgtacggagtagtaaaatcataaaacaaacgtctatactctttactattgttttgaccttccaaggggtgggaaaattcatgatgactcagccacggcgtttgaggtcggaggcttggtgcttggcaattgatatctacacctggacaagactcgatcatggcatatatagtgcgcagcaaggtaagtataagtccaaatgagcattcaagaagtctaacattaacataggtaaccacagtaccttttcaaagacttgcgactttcaaaccagtggtgatcctggctaacggcctgatatcaaccccgagtctccatacaaatcccactggaaggcctcaattgcagagtaattcctgcagaagtaactatgctcgcgaatttcactcaactcccatcacaatgtcaagcaactccgaactcaagcagactttgataccaagcctccttgatgacgtgcacaagttgtggttcaatcacctgagctgcgaagaggccctcatcctacccggatggagcgagatggggaagtggttctctcgtgacgaggcttttgataaggcctgcgtgtaagtgaccatttgccctacttgaaccccatagaagattaacgagctcaaacagcacccaattctgccctgccctagaaacaatcgttggctccagagcatcagcttcggacattctatctgaagtcagcctgtcctcgccgatggattggctcagcatcattcttctacttgatcagattccccgcaattgctaccggggagcagagtcgaagctagtgtttgggcgctttgacccattagccgaggagattgtccttcgagcaattgaggaagaggtaccgatccgatcgccgtatctcaggtaccacatggcttaccgtatttggttccatatgccccttatgcattcggaaaacttggctatgcatgagctagccgtcaaggtgcacgaggatatagccagagatgtcaataagcttctggccagggacgcatcggctcttacggaagaggaaagaaaatgtcgtagcattctatccgagaagagagaggcactacaggcattcttgagcaatgctcttgattttgagaagagacataaagtgatcatcgagcggtttggacgatacccgcatcggaatcaggcactgggaagagtgtctaccccggaggaaatcgaatacttaaacaatggcggggagacatttgcgtgaagccaaaccgagtttgtatatattcacgaatacgcacataatagtaatatgatacagtattgagctacgggggagccagtctccgcagacaaaagcgtcgaattattatttcgcaatagaaattggccaccctacattccaatgaacgatttggaattccgtcccaaagcagtaaatgagcacctgccctttcaccctttcaccccttggtagctcgcctgacccctttcctattcgagcagaggccacatacctttcttattcgggtgttgttgaagtgtacataaacaaacaattgaacatcaagccggtttcagatagtgaaacaatgaccagaataccgcatctgttacagagatgaagttgctctttctcatctggatcagtaacaggccttgctaacactaaacgcacaattcaaaatcatagttcgaccatcattactataagtgctgtctgatagaactgaacgtggattcaagaaaggtgaactggaggcaacaatgggaattttggtcttcccagctctatctcattcatcatgattataccacgccaatcttctatcaggcccttcattgtctcgctgctggttgtctcagtgatatcctctaaagtgcttcatcttctccaacatgcgttttctcttcccggcggtcaattcgcaatctacttcccgacattcttcatccttgagacacttttatgcgtggctgcgtgggagttgctattcaaatttacggggttgaagtcacttttgggcactgcagtgacagtggccataacgtaagtacttctctgcttctaggtagaattcaatgagactgatatactgactgctacagggctctgagcttcgtcttgtcttcatctcaaattgggttctatcttgtaactggcagtgagatccgttgggatgcagccacagccgttggaactgatccagaagggagaaagctgatgctgagcgggctgagatcctttttgggagccgcatgcgcccttcttgtgatttcatggctactcaaatattggatatatgttctcataggccattggatgtctgcactatttagcgcacaaactgaaaaggcagacgaagaaggcatcgtgaccagccctcaaagaaagtcgcggacagcacgactcattcaattttggacagtatgcgccgcggtattcattggattcttgcgcttggctcggccccaggtgccttataaccatatgtctgagactatcccattcagctttttctgggctttgggttcgaggcctgctgagctgcatcagactggagatcaatcatttccgctcgcagacctgattgatgagccatactgggaaggtccatacgatcacttcaagggttgggccccaggaaagccagactccaacgcgaaaaagagtcgacccgtatgggcgtctggggatttaccaccagggttcgaccggtggagtgaagcagagtccggcgatgaaggagggggcgttactcttaatgagaacggggcttctcagaagaatatttatcgtcccacggatgaccctctccgaatcaccaacctcaatcgtgaaatgcttgagcccatagctcaggttctcaagaaacatcaagttcccattacacatgtcgtacttgtgttgatggaaagtgctcggaaggacatatttcccttcaaggcaggctcacatctgcacgagatgattctatcgtcctgtaatacccaagaccccgaagtactccaagaggtcaacgacaaattatcaactttgacaccaaacgcagagaagttgaccggtgagacgagtggactttcgacaagtaacaacatttccagcccctctagtggatggaatggtacgacggaaccaggaatgggcggtatcaatgttaacggtgtcctcactggtagcagtctatcgttcaaaagtgcagtcatgaactactgcggcgcgggccctctgccggtgaacttcatggaggaggtcaacgccaaaaactaccagccgtgcattatgcagatttttgaattgttcaaccaacttaaaaagaactcgactgagaagggcaagcctcgaaatgggtttgagcacattcatgatcgaaactggagcactgttttcttgcagtcgatcacaggactgtatgacgagcaagatgagctcaacaagcagatggggttccaaaaatacatctatcgcgaagatattggccagcaaagtgccaaatattatcacgaagacatggaggagatcaattactttgggtaagtattctcccaccgactgagcatctacattcacattgctaatacgttacctagatacccggagtacgagatatacccatacctgcgagatgtggtgaacaatacaatcgagaacaacgaacgactttttctatctcatttcacgagcacaacccatcacccatggggcacgcccacagcataccacgaagaggaatactttgccggagacagtctcatggcgaagcacgaggacatcaacaaatatctgaatacggtccgatacgtggacacatggcttggcgatatgatgaaggtcctcgacgaagccgggattgcaaacgagacattagtggtattcgtgggagatcagtatgttgcgccagcttcagtaacttcgcacaacaaccaaatagccatgtactaatcccaaacagtggccaggcgttccccgaagatgcgccagtctctggtacatatgagaacggacatatcagcaatttccgaattccactcgttttccgacacccgctgttgcccgcattgcaaatcactgcgaatgcaacctcgatgtccgtcgtcccgaccattatcgacctactcgtgcactcgggctcgttgaacgagatggattccaatgcggctttagacctgataaatgaatacgaaggacagtcattgatacgcccataccaagctactcacaatggccgacaggcatggaacttcggcattatcaaccccggtggtacaatgctcagtgttgggtctgcggcagtcccgtatcgactcatattgccgcttgctgaggactttgagtacattttctctgatctagataccgacccggatgagttaagtccattgcgtgggtggtcccttggggagttgatcggccgtgtacaaaggaagcatggagacaaagccgggaagtggctggtagacgcggagaaagtggggaaatggtggattgaggagcagaaaagactgtggaattaccaataataatgcaaataaatctgccattcaagaccctaggagaacagagaagaataggaggagaagcgggttgccttgatattgttcggtttctttgtttgcgcctgaggcagacacatccgccccacctccacttcatgttttatattcgttgcatttcgcgttcggtcttttatttggactattatcttttcaacagcttgattgatcgagattgcacccttagctctcggcagcgcagagccttaagtctggagacctaacccggactcatcctgtgcatctggcccctgtacccccactatttgattgcatcccaacaattattcttccactcagaaagtttctcactgcaatctccaacaaatcatggagggaaaatattcgaccgatcccgagtgggcatctgtcaccccaattgacctggacgatggttcgagctcgggtgccatgccactggcgaccatcgcctacccaaccgagtacctcgaggcgacctcgtatttgcgtgctgtgatggccgcgaacgagaagtctgagcgggcattgaacttgactaaagatgtgatttcgatgaatccagcgcattacaccgtatggtaagttggctagtaacagccttgggacatgccaatatcgacgtctgacattctatacaggatctaccgagcaaagattctctttgctttggaaaaggatctagatgaagaattgagctggttgaacgatgtttcattgaagtacctcaaaaattatcaaatttggtatgtcgacaccaccaacaacagaggagccgaaagaaaaagccaggaaaatataaataccaaaaacaaacctaacatctcaaacaggcaccaccgccaagttctgctatcatcaaaagcacactttccaaccttcccacccaaagaagcagacttcctaatggagatgttcgcccaagactctaaaaactaccacgtatggacctaccgtcactggctcgtgcggcacttcggactatgggaccaaccgcgcgaactcgaagacgtggaattcctcttgaaagctgacgtgcgcaacaactccgcctggaaccaccggtacatgctccgtttcggaccacgggacacatcggtcccagacgcggggatggtgaacgcgggtgatctttcgactgcgccggccgataagggcaggctgtctgttgtcgatgaggacttggttgatggcgagctgaagtttgcgcaggaggctatcctgcgcgccccggagaaccggagtccgtggtggtatgcgcgcggtgtgctgcgggctgctgggcgtggattaggggagtgggaggggtttgctggtggatttgtttcggagggggccgttaagagttcgcatgctgttgagtggctggcggatgtttttgctgaggctgggggggaggaaaaggctgtgaggatgttgacgatgttgaaagaagagtttgatcctattcggaagaattattgggactatcgcattaggaagctggatcaggctgtggcttgatttgaagaaagacactacgccttgtgctgaacaacttttgtcggataatttatatctgtttatgtacctttcattgaaaaatcgtacgtctaaagctgattctgcttcgaattaaaagactgctggatacactgtatgattacatgaacgatgcgaaagtctagacctttatctagacggtaattaaaatgtccaagtgtagtgctgcaaatcaaacgccaaaaaacaagtcaaaaaaagtatcgaaaaatgaaatatatccatcatcgaaattcaagcccatccctcatccaacatcctgcgccattcactagccatatcgatagtgacgttgctaccgccgcagacaatgatgacaattctactctgcgagttgagatcaggaacaagttgcttaagcttcgaattcagtttctcgccgacttctggctcaacctcctggtctgtctcattgtccgtcgaggtcgaccggtcatccccatagccctcatcgcggtaagtaatatcagtctcatccaagcccctcttccacttcgatgtaggaacagcagtagcagcatcgccgatggccgcttcgatacagacaccgcacgcaagctcgacgaggagtcgttcatcgttggcgaggcggagcacgccgcgggcggcgtctgcatctgagagcacggcgctgtgcaccttgatgcctgggggcggggacacggcgtactggaaagttgtttccgagacgcggacagcaccgagagaagtggcctgggatgtgatccttgggagggagatgagggatttattggcgatggctgctgccagtgaatcggtaccggccgtttcaatggcgaggagatgaatggggtttggtgtgggtgaggaatatgaggtaatttgcttcttctgtcgtcgcttttcgatgcccatgacgagtccattgagaaggccgccaccgccgacgctgcagaggatggcgtctaaagggagggcccggtcattgtaggcttttttgtcttcgggggtggtggcgggaggaagctgggtctcgagctcgtcgatgatggtgccgtttccttcccagataggctggttgtcgaaggggtggagggcgattttgatcacatcctggtcattcccgctgcttgtcttcatgatagtttcccgcatgtattctcctgcttctgaaaatgtctcgccatgccggatgacgtctgctgcacctgccgcccggatcttgtcaagcatcaagggatttgtgcccatgggaaccacgacagtgcatgggtagcccaggctccgggctgcacagacggctgccagtccggcgtttcctccggacgaggcgtagaaatggactctgcggcccacgttctctgggttgcgaaggtgagaaaggatttggttgcccatagcacgggacttgaaggagccacttggctgcacgttctctaactttaagaagatcctacaaccagctgctcgagaaaggcatgcagactcgaccagtggtgtctcaatccatggcgtcttgaactgcagctgaccataggcggaaatgtcgatgctccccattttgatgtgttgaacaaatggaaaaagaaaaaaaaaggttaccggagcaattccaagaccagaagtatagagatgatgttccccaaatagtatattgttgagtcgagtggttacacgacggtaggttgtaaattcacgaaaatagagatagggagatatcgggaagaaaagaagagcgataaatactgaaacttccaaactccaatatgcagatatgaagatatgaagacatgttttgatatacaagtgagcctcaagggccagtacaaaagctttccgacgggaaactagagtttcccgtctgataggactgatcggagtatccggttctggcccagcctttcccgtcgatagccatgtgggtcgttcatgacgaccatgacataccgtctgtttagaatggccgggcgtgggaaacctggcgtctcagctttcgaggtgtggaggagggggggaaaacctcatctggtctgccgcatccgagcggagaagatgtatatctttattcagacgggcgtctcggccgcccatgattggccgccgatcgattcctcttatcaaatcgaaagctcaaaaacaggcggattactcctcagtgagcaaaggagggaaaataatgcctttcttaacgccctcgccgtaatctgaatccgaaccgtacgccgtggccgcgaatgcccgcttggaggggtccgaggtgtttacacggagcaattctagaaggtcatgagacttgccgggcatgaacggttgcaataaaatgccagcgatccgcagcgattccgccacgttgtagatgatccgttgagggttgggagttttccacggttccgacgcatggaagtacttgttagtctacaagcaggtcaatactcgccgaatccatgcggggatgatcacctcttaccttctcaataatgctcataatttcgtgcagcgcggcacgtgggtttagattctccataagctcggcaacctggggaggcgtctgggccaacatttcctgatgttccaagtcctcaggggtagcagctggaagtttacccgatcgggcgtccataatgtacgagcgcaaattgccacgcgcacatccgattgtacgcagagcaaggtttccgagtcccccctgaagcaatttcttgtaatctcggatgatgaaggaattgtcaaagtccgcatcatcggcgaggccaccccggtacgctaggaagaatcgcatgccatcgactccaaaccgttcaatggcgaaaaatgggttgacaacattgcctgtggacttggacattttttcacgattcatcgtccagtgtccgtgcaccaagacgttccgaggcagaggaagatcaagtgccatgaggaaagcaggccaataaacacaatggaacctgccaatcgattaactctgcacccggttctccagctgaactcatgaactcaccgaacaatatctttgccaactacatgcaagtctgcaggccatacggatgtgttgtcttttccaggtgggaaaggatatccagctttggtcaagtagttgaccagcgcatctagccacacgtagattgtctgcgtgtcatcgccgggaacacggatgccccaagtcagacgttccacgggccgagaaatcgagagatcctgcagtcccgactcaactccgttgatcacagcagctgtataggaggtaggggtgataaacggatcttctcttttgtacaagtcaagtagacgatccttgaaggctgagagacggaagtggtagttggtttctgaggaccactctacctctttacccgtttctattgagacctgtgtggtgttagtattctttctctttgaaaaactgataaattacataccatgcgcttcctccctgttgatggatccagggagttctgcacttgcgtctgtgggtagaatgtctcatcgctgaccgagtaccaaccttcatgcttcgaggtgtagatatagccccgatgttgcagcatttcctactaattatcagcgtgccctactatgaacggagcatagtaacttacccagaaatattggacggcatctcgatgcgccgggtcggtggtcctgatgaaatgatcgttgtcgatgtttgcagccttcgctagggcctatatcacaaattgagttggagatactcttgaatatagcaaaggggactcgtacctcaaaggtccggcagttcatatcgcaaaatgcctgggtatccatgcccgcttgaatggcagcttgttggatctgcgatgaatgtcaacgcccattatcgaactgcaatcccatctgtatgtaataccttcattccatgctcatcggttccggtcaatagttgagcatccgtgttcccgagtaagacctgccaccgtttcatgatatcggcgatcaccattgtgtataaatggccgacgtgaggggctgtaaggaaaacatattgttagaaaatcagtttatacatggtattcactacggtgctcaccggcgttcacgtagaaaattggcgttgttacgtagtaaggcttggacctttgcggcgtagttgcaactccgcgccggggggttgttgcccatccatgcttgcaagatatacagttccacggatttcttgatctcagaagctgagacgctctgaataacgagcgaagtgacgtccttgctgcagccattgggatattgataacggcaagaagagcatgacatgttattccgcacatctcgggtggtccaagcttctccgcaagtcacggccttttttttgcgcctacatcatcgcgcttacatcgtcatcgagaacacccacgaccttatcgtcgataagtatatattattcatttctctcatttaaaacattgtttgaagcatacctctacatcttcttgtatcacgcacaattattcccgggttttctttggcgtgaaataccgatcgcgatggctacagcaagcgaggatacactgaccaaagtgtcgaccgagggtaagtctcaaattataagttaatttcatgccttgaactgacatttgcttgcttttgtgttcagctgcaaccgagttcattaagaccttctatccggctttgggatcaaaccgtgaatctctcagctcctactactccctcgagcctacaaccatcctgttcaatgggaatcgtgtcgcagatggcgctgctgtgcaggaaatctttaccaatcaaatgtcgccaacgtactacgaagtccaatcatacgactgccagatcatcaacaaagcataccccaccattttaccgggtggtggactgaagccacagtccgagatgggagtcaaagacatgtcatttctcattgtagtcagtggatttgtccgctatggcgagggtcgcgatcagccgcaacgcggattcagtgagacatttgtgctggtccccaatccatccgcagagagggcgaggggccgcaaggattggctcatcgaaagccagaacttccgccttgtggtttgaacaattattccaacgaatcatgaatcagcttcaagtcaagagactatgcatgtgatacagaagtgaaagacaactgagtcatacccacccaccaaagatgaattgctgagagatacacgatgcaaccaacgatccactgcttgagatttgcttcaaaactagagcgccagacgccagaagggaaggaaaatgatgatattacccctattatcagggggattatggcttagccgatgtcttgcgcggtatgcggaggtttgctttgactctttcaagcagctcctcacgcgtcgcagcctcactcggtagaagccctctctgagataatcggtcagtgtacgattcacaagaatgtatgattatctgaacacagtcatgtccgaacaaatcactcaaacataccgctttaagccatcttcgcatctcatccattgtccagttttcagggtctagcttccattagcccatgttagatacctaataataattactcttaccaccggtgggatctgcttgtgcgggaaggacatcgctgcccaagatagtataggctgccactgcagtgaccattcctgcgaatcctacataggaagatagtggtcagaaaatgttgccaagtgccttgacttgagatcgtctaccgaggaatagattctatcgagtccagtattagatatctatcataaaagtatagacagacgtagtaccttagaatgcaatgctcggtccaaaggggtcggcatcttgaaaatgatgcggtgattatttgaggttcttgggttgatgcagaagtattgtttcttaatcgtcaaaagagaagaaataaagaagaaaagtatcacagggcacgtgcaaaagacaagtattcaagacgaatagatgtgaacagctcgtcaagacgtgggttgcaccgccacactaacgccaccactgctgccttggaactatacagttgcacctacttcaactacatatcttcgataactcccaagttcagttggtggcactttccatgaactaattaaatacgtaaatatagacttatgggtattgctcaggtagaaaatgaaatgtgagcctaacaactatcatcagcatcgcatatctatacccaccagtccagcatggttaccatcattcattttgaaaccccttgaacagtcgaattaataaacgacatggaagcagtcattttcctgtcttcggttacattcgttattgcggtgggagctgccatcaaacaagggtataattgatcaccattgcagtatcgagtcagacattgattccatttacagcatagccctttacagacgataccgagtccacctacatgtcacatcaaaaggcatgactcctccgcagagtgtggacctggagagattcgatactcaaggaagcacacccgttcagccgccgccgaaactgcatcaccattcacgattggagagcagaaattcaagatggccaggatatactgaccgacgaagtcaaccatcgcgaacaatggtggaccattttgcgtcatatcgcattcctgaggaagcagagacagggactgttcatcattacccgtattcgcattcgctgccccccaatcttccagccacatttatggccccagttgcacgagccacaacaccaccaccagccacttcagttaccccgcctgaggcaccaactgtagctcatggctgactaagcaagggcttttgcagcttaaagccctaatgtgatccgcacacattcaccttagaggctagtgtcgacagtgagctttctcttttgcaccttgcttcaaaacacccgcaaccgtcattatgcctgccgaagtctccgatatcaagcagttcattgagatctgccgccggaaggatgcctcctgtacgttacgctgcatcgatagacctccgagatgaggcctggggatgatcatcggtgctgactgtttacgcctctagccgcccgcatcaagaagaacggcaagaaccagcaaaccaagttcaaggtccgctgccaccgcaacctttacacccttgtcttgaaggactccgaaaaggccgacaagctcaagcagagtctgccccctggtacgtttcaatcgcattgttcctccgtctgagttattgaggtatcagaggatatacacttggaagacggctcttggatatagctctgaacctatgctgacgattttcctctgaacagccctcaaggtcgtcgatgtctccaagggcaccaagaagaccaactaaattcggtaaccatggaatgaacggagaatcggagtgcggcgtgattggttgttgatgcatgcaagaccaactgttggggggatacatgacacggccgtggtccctctgcgagccgacacggggaaaattccgtggcgtggaacatgaatcttacgtcgcaggagtttctttgcgcctttgaaaccggctgctgttattcaccggccaggcgactcgtattttctggacgcactcgaggaacacttttgtcggaggttctagtccctacaacccaatgaaaaaaaaacagttgaaatatcattactacatgggtttctcgttctcaatcgagatttcctaatccattattctcgtcatggatattctctcatctcggatcttgtctcccaaggcaacaagtagaccgtatggaatagatcggctgtccttgaaatttccagttattgactctacttcagtcgtgatctcgagttaaacaatctcagattgacattgtgaccacaattctttctttgctttgatggctcgactgagagcaatgacaatgcctatttttagggtgttgatactccgcacagccattggatctaaccatcgcgcctgcctgaattcagtacggcctaagaacactgccaaagtatctgccacaatggagtctgctactatagattctaccaggttcctataggatttaagtacttggaaatggggcagttgataaagcaggtaatgaggcagtttacgatgaagcaagatatgataggagagacttatttttgttcggggtttacatacaaattgtaggtacccgttgctgtctaccgcagaagcaggtgggcacctagcctaattaggaaggcggtactgaagtcgggatcaataccctatttttatccggcgttgggttctttgatatcggcctttctgggtctttgttcgagtctaattcatacctttgctagcacaataccgttgttgaggatcattatctctcagaacaggcgtctcgaaaggcctttgtggatttttttcttctaaaagtcaaagcaaggatggatgcccgaagcatgcctcggatctatataaatcatctcgagctcgtcaaaaatgaagctatcaacagcattagcatcgcatttttccgtgcctatatatcatatcttctccagaatcttattcgagttttaacacggctggcctcattcagacaacccagcgaaggtggaatcgaaaatatgtgccacaaaaagccactgatccctgctatgggaaaccttagcatgttcccagcagagattatcttcaatattctagatgaacttttggcgagctctcccagattgacacacgaaaacttccatgccattaaccagctgacgaaaacaaataggacactagaacaatacatcaaactcggatggatgggtagcaatgcgtcgaacagtttcaagcaaggcgtgaatactgtccagtggtactcaaacagcgataatgcaaataaggctttaaccctccagggcgtagaccctcaacgcatcatgcccatcgaaggtccccgcggccttggtcccgatctcatcaccggtatcattttggctgactgcacagattgttttgagtggttctccgaggttctgcctgctacccatatgagctgttgcaacgagggcggctggtcatttctttctctggcactgtacgctagagccgagaagctacttgatcttttcttcctctcgggctttcctttcgaaccgagggattttattatcggcagtgctaatgctatggggaaaggtccgtcaatccttgggcttgctgcctcatctagagatcatcagtctttctctaggctctttaggaaactgaaggaagtcttgaacgggcacggcttccagaggactcttagagatagactcacgggtaaggagcgagcggctattcgaagtgttgctcctcagtatttacagaagatgttgtatgaagctggcctggtcactatgcacccggctcttcgttatagtccatactactccggtaagcgcaccctgatgtactaatcttctcgttatatagggttgtatctccttcattacgcttaggacaacgttactgacattcgcataacatttctctacctatctctcagtgaatatttgttactgtcattgatcttgtcttattttgttaagtcaactactgatactgtcttggcattataccactttttacatttacattttcgggtgttaacatatccagcgtataataatcaatcagaactttagctcgagtatacctcattattgtgcattaccagatatatggaataagtagatatcagcccttttttctatctttagctaactagtacctaggtatttctgtagatcattactcttcaagccacggcactcagcacttcattcctatacatgttgcccttcgcgttgcttggcatgtcgcagaattccttggcatcaatcgggtcatacggtgagtagactgagagtcttaggaatattaggtactccgtacggagtactccgtggcagattctatatttccgtcggctcgcataccgaggctttccattcagaccaataaaataaaaaggctgagctcgatctatgattttccaccaacaggttcccataacaacacttcttagctcacaccaacccgtgccaattgacgtaattgtgcttgatactattccatgatcagaacggacctcctccaggaacatacgcccggctagattaatagatgaccagactaggacgatatctgagagggctatgtatataaaatatagctgttgaggtcaaatatatatatcatacacatacagaaatatccattcatttatttcccagaaagccagagcaaaatgacactttcaaagctatctacgctcctagcctctgcctctcttgttgcaggccacggctatgtctctagcatcgtagctgatggcaagaagtaagtcaatctaagaaacaaagtctccataccaataacaactaaccacattatcagctacactggctacatcgttgacaaatacccctacatggcagacccccctgacagtgtcggctgggcaacaacggcaaccgacctcggttttgaagacggcaccgaataccaagatccgaatataatctgccaccgaaacggagtcaacgcagctttgagcgccaccgtcaccgctggctccagtatcgatctccaatggacgacctggccagactcacatcacggtcctctgataacttacctcgcctcatgcaacggtgactgcagcacagtcgacaagacgacactaaagttcttcaagattgaagaagatggtctcatcgatggtgcaactcctcctggtacatgggctaccgatgatcttattgctgctggaggccagtggactgtgaagatcccccccactcttgctgcgggtaactatgtgatgcgccatgagattatcgctctgcactctgctggccagttgaatggcgctcagaactacccacagtgcttcaatttggaaatcactggcggtggaagtgatgtgccggatggcacgtttggtggggagttgtatatcaatactgatcctgggatcctgttcgatatttattctacgcttacttcgtatattatcccgggaccggctttgtatgcctgactcagggttataattaaacatcaggtggagggtgtttggagggatgtgagtttggatgctcattctatctagtgttattcaaatatcacgaaatgaatgaatgctatgtgataacacaactccaaaccaaccagagtccctataaaacattgataattcgaatctattctgttctctcataaggcaaagcgataaaccctcgcacattcgccccctcaagcgccgcatcaataccacttagactcaaatccatcttgcgcaactcaaactccccaaagaaattcggctcagcagaaaccctctcaaagccaagtccctcaaacaaagccaaacttctcaaattcgtctgtccaatcttgacattgagatactcaaacgataaccccttcgatgaccccagtgtcttaacaccagtccctaacttccgcacagtctcaacatcaacatcaccaccaccaacaaactcatccagaatagcaccctggttctgaataatataccgcataaacatgagtaatgcagcgcgcccaaacccgcatcgctggttgactttctcagcgatcatgagctcgagctcgccgattatccgcggcgggctgttgccctcctcgccgtcgtcgatgcgcagaaataggttgatatcgccgaccatagtagccggcgaatcactttcagtttgtagctctgtctggctaggggcatcgtcttcaatgcctgttgtgattgcccgacagacgataaaggttagcttgtcggcgtcttggcgccagctgcgttgcatcgagtattcttcttccagagttaggggctccgaggctgttgcttcttggatttccttggggtctgtgagaaaggtggccgatcatagctaggatcttattgatcttgtttgcttaccgggtctttcatccattcgtggtattggggtacatgccatgatgagtacgggactaaaagagcctttgaggagcagagggctattccgcggaagtcagaattagcttcttctgtttgtattatagtctcaatctgcaaatcttcggggaaagtatatatccaggtatgggcatagagcagcgtaccgatgttggcattgagcagcattgtggtggatgatgagaatataattctttgagtatggataattcagaatgactcaatatgtatgcactcttgcggaaaaactcgttgtctatcaatatctcgatggatataaagcggaggaagttagtgggatggatttctttccaaatgtgggtcttggcgcgtagagcccacccggggtgtatacgacaggcttatataaatgtatcagacgtgtagggtttgagaatgtaattatttcattagtaccattgattggtagctctatcagtttatttttgttcttcctgaccgttgaaaactccaaaccggaccacctcgacctctagcgtttcggtatcaaccagaattaactccccagtttcgctgaatttgggaagtgccaacagccgaacacgggctgtatcagaggaatcagcggcacccgtcatttcagtgtcgccatctaggcggggagggacgccaccttcaatcgtggtagtcttgaactgtggttgattgccagcgaaaaaaatatgaggacaggactcgatgacatatggctcctcggattggtatggatatgaccctaaagggtattgttagcataaatttctctgaaagattcaagtgtccaagcatacaaattgtgtccggcgcagtgggaacaccgcagcgccaacgaagcatagcttccatgattcgcatccgagcattcgaatctgtctccttttctgggctgctatcatcaccctcaatagggatataccgcagaacatcgtcaacattctgaccgctgcatccccatactcgccagccttccacgtcgccgtcccatgggttcgtgacactgtcgaaccagctcacctcaggcttttcatcccctctgacaggaggtgcggaatattctcttgcctgagggaacatagtacgatggatcccctgttgagggagagagaagttcgcaggatctttttcgcccggcatgagtgtgataggaatgctgggcaaaatctccgctagaaagttatcgagttctgtgataggcgcggcattgtatgcagagcagtcatagccatactttcttggctgggcttcctctgcctcagcatcgccgaagcttgtcaccgccacatcttcaattatgttggctccaattgaattacctgcgatgatcaagcgggagattttagatgagcccaaggaaggactgttttcggcgttccccgagaatcccgtgtagcccagaagataatccgtcaatagctccaaagcaagcgtgtcgcttgatgttcctgtgatttccaggccactaacgaaggcgattttgccgtgttcctttccagcaagtggagcattgcccccccatcgttgaagctgcggagccaaatccggaagcttgatatcaataacctcgaaatctccatccgcattttcagtgcccaaagccgcgataattgcacctgtcgccagctgtgtagactgcaggaattttccggtgagccgtaagcggccagactcatcttccatcataatttgggtcaaagaggggtctgaagggtcggtgtaggtgaggcggggagggggcgcagaagtgaagttctatgggttgtcagtggaagaagcagcagcaaggttagaaaacgaacctcttggttgagatcatccaaaatattcggcttcattggcaaatgcatatatacggtgccggccacccaacacagctcgccttgtcggacatcgaggactcggtcgacacgtcgcaccttctctccagcgatctaattcacaagcaggtgttaggaaattccatagccgagagcgcaaaatatttcctaagactgagtgctcttacaatgaggccatcccacgcatccgtcgcgacttgttcgacggcaggtttcaactttgcgagtcgcaaaaagtacatgtcgtcatattgctgctgatagtgtcgtcctgcgccagctggtaggtggaaggtataaccaggaccgtaataggagtgattgcggtaaattggctcttgttcctgttcctcctcgctatcgcagatagttagcgaaagctccccgaaacgtagcagcttggatgcagagtggattaagaggtattacctggggggacacaagaaagtgtaatcctcggcgtccggtaccatattttgcggaatgatgttgaggccttgtgtttcggggatggttgagatgaatcgtgatgcgaagaggtgtgtttgacgcgctcacgcgtctgttagcgcgttcaattacattaccgctttgggaatctagtgggtcgatgtaattttatatgggagtaatcggactgactcctggaatctgctattattcccattaacctgattcatcatactattcttttcgttttctagttttcacaaattccttaggctcaaaaaaacgaagtatgtattttgtacttcgtagcgacagatcacattaagccgacctcgggagttctctgtgctcgatgatacaggaaaagagtgtatacttactgagatgtacgattcacaaagcaccatatattgtacccaggagcacatatggagatcggctaacagatgcctcggtccgtgcatatcttagggcttccccgcatttctattcttcatatttgaacgtggaacatctatacactctccatatctaagaaagcatcgagacaagaccatctcttagatccacctacttctacctctgacaatctaccatagccatctctacaacccaaaaacaatgtctctccaaacaccactatgctctctcctcaagattcaacacccagtgctgctagctggcatggcccgcgcatctggagctccactagcagcagcggtctctaatgccggcggtctgggtacaatcggcggactaggctacacaccagctcaactatcagagatgctcacggagctcaaatcactcctccgggacccctctctccccttcggcgtagatctcgcccttccgcaggtcggaggttcagcgcgtgcaacaaaccacgactacacacacggccagctggacgagctaatcgaggtgaccatctcgcacggcgccaagctcttcgtctctgccgtcggcatcccgcccgcaaagaccatcaagcggctccacgaggccggaatcctgattatgaatatggttggcgcaccgaagcacgcccataaggcgttaaaggcgggggtcgatattgtatgtgcacagggcggcgaggggggcggtcataccggcgaagtgccgttctccgttctcgtacctgctattgtggatgttgctcggcagtataagagtccgctcactgggcaaccggcacttgtcgttgcagccggtggtatcaacgatggccgcagtctggcggcgtcgttgatgtttggtgctgcgggtgtttgggtgggcacgcggtttgtggcctccgaggagagcggcgctagtcgcttgcataaggaggctgttgttggggcgcaatttggcgagactaagcgcacgctggttgtcactggtcggcctttgcgcatgcttcctaatgattatattaaggaatgggaagcgcggcctgctgatattgccgcgctgacttccaagggtgttgtgcccatgatggatgatttggagaacgacaaggacaccgatatgccgtttctcatgggcgacgtctcggctagtgttaatgagattaaaccagccggaatcattgtgaaggaaatggttcagcaggccatcgaggtgctcaaagtcggaggctcatatatcacttccacagggtcatcgagtaagctatagatattaggtaaaagttaggatgcatcatatttgccaagatttttttcttgttatactatgacatgtacttgtacagaaaatatgaaaccaataagacttgaagaaaccaacgaggaagatggattatgccttggtaattaccgaggaatatcgcgagacagacaaaaaatagatggcaaagaacttctacattttcgaactcaacccgaatcttcagatctctgtaaacccaaggcaaacccaagacaaactgaagcatttgccttgggagaaaagtacgaagtccaagaccgaatgttcatggaggtagccaaagtcgcttcgatcaaaatcgacgtcaaataaattggaataatcttagaaaaccaagccattgactcccgcagtgttgccattcgctcgagcttgcaaaagattcgggggcggggtgggaccgaagacaggcttctccgagggttgttcgacccgggttgggggtggctcgagatcttcctcatcactgatatcctcctcgtcatcttcgtagtcatcatcgtactcgctttcagtgccttcatcatcgccctctaaatgatcatcgccttccgctagagcaagtccttcgcctcgaccctgggcttgcatacgccgacaaagggcttctaggtggtggcacttccgtcgccaccgttcaagttcttcatgatttctggtccgttcctctgccatttccagaatattgcgattagtttgctcgtgcttccgattgagagtatgattctccttctctaggcgcttggttttcttggacatttcttccatctccttgcggaaggtaaggaaaagatcgttgctgttgttcaaagtgtcctcgacctggtggtcttcgtcagcgaccggggagtgagacgggttataggaacccttctgtacctgtttgaatttttccacatagatgttgagttggctgcgcagttcagcctcggtatgggagaaagtggaaacctgagaggtcaaagctcggcttcggttggcttcaacttcaccagcgcggcgctgctcctcaaacttggaagcgagactttgaatctcggagtccttgccacgtaggaggcccctgtaatgcaagtcgcgtgtgtcaaactgctcgctaatggtcttaagcttggcgcggagtctataggttccgattagcaaatgtgaagctcggagaaggagaggaactcaatcgtacgcttcatccaaatcgacatccaccttttcgctacgagggttccctttggcagccatgacgtcttgaatgtcgtaaaggagcgagtcgagacgttcgttcacaatcaatcgcgctttcttctcagtgtcctccagcttcttattctcatcctaccaaatcgtttagctggcaagtcctccgcggtgtttggcgcaatcgtctcgaggcgcatgctgatggacccaccttgacctttttgttctccttggtaagttctcgacacagcttctctagcttgtccttcattgtaacggtcttgttgagatcagacttgcccttatcctggtccttttgcaactgatcggcgcgcttcttgctcttagaataatcacgatccaacttcttcatatccgccaacagctcggtgtacttcttatggacggtttcgagtttggtcataggggattcgatattgctcaaaagctggttgagatcacgggttgctttcttgacctcgcgctctgtatatcaaaatccaagtcagtgacccttgttccagactaaccccgcagtccagcggtaccaagcaaagaagaaaaatgccgccgcagaatacaaagggagtcacgcaccaatttccgcctcttggtctttctcgccggcggcatcttgctccagctgggagatcttggcggctaaaagcttggacgtctcgtttggatcggccgctttcttcaccttgttcttctttgccatggaggtggacgacatttcaaggtatttgcgtgagtagtgcaaaaacagcgtatttggcgattcgattcacgagggggttggtacgaaggccggaagccgaaaatttgcgccgaataggcgggatacagggcaggatgtagacggatcaatcacacggaggagagatcccggaggcaaggctcacgagcgggatcactggccctaggatgtaaggatcgtttgcttgtcgtatcgttcgggaaagagcaaatgttggtcttcggagcagaacttcgacaagcgggcggccagagtgaggcttacgctagcatagatgatgtaagcctgggcggtggaacctccagggctggacattttcgactccggggttgttcttaacgatcgtcaactacccataattatgttgcgctcatcgatgcgcctcggtacagctcgagtgcccaagtctaatccgcttattagtcgttcattgaagtcaacgcaaacggtccttccgcgcaatacccggagagccgcatcgacggtgaccaacttggataactttcccaaggtcggcgagaagctccacggattcactctacaggagaaaaaacatgttcccgagcttcatctgactgcagtctggctgaagcatgaccggaccgatgcggactacatgcatgtcgccagagatgataagaacaatgtgtttggaattgggttcaagacaaacccgccggatgctactggtgtgcctcatattctggagcatactacattatgtggcagtgaaaagtgaatcatatcatattcaatacctatatttttgctgaccttatgctccttcaagatttccaatccgtgacccgttctttaagatgcttccgcgctccctatcgaatttcatgaatgctttcacagcctccgaccacactacatacccctttgctacaaccaaccaacaagatttccaaaatcttctttctgtttatcttgatgctactctacaccctcttctcaaggaatcggatttccgacaagaaggatggcgcttgggccccgaggatccgcgtgctggagagtcgattcccgggcaagctgaaaaacagctatcattggaggacatcgtatttaagggtgttgtctacaacgagatgaagggccagatctctgatgcaaactatctctactatattcgtttcaaagagagtatctttccctcgctaaacaactcgggtggagacccagagtatatcacagatctcactcataagcagctgacggagttttccaaacgcaactatcaccctagcaactccaagatccttacatatggtgatatgcctctggctgatcacctgcagcagatcggtacagtcctggatggctttcagaaagggcacgcggatactgatatcaagcttcctctggatctcaccaagggacctcttaatgtgactgttccgggccccatcgatacgttcgccagcgaagacaagcagcacaagacatccacatcctggtacatgggtgacacaaccgatattgtggaaactttctctgtaggaatcgtttcctcgcttctcctcgatggctacggctcacccatgtaccgagcccttgttgagagtggtctgggctcttctttcacaccaaacacaggtcttgacccatctggtcggattcctatcttctcggttggacttaacggggtgactgaagcggaagccccgaatatcaaaaacgtgattcaaaacgtcttccgggaatccgtttctgctgggttcagcgaggagaaaattcgtggattccttcaccagctggagctttcgctgcgccacaagactgcaaactttggaattggtgtgatggagaagaccatttcgtcttggctcaacggctcaaaccccatgaaagagcttgcttggaatgatgtcatcgacgagttcaagagaagatatgctaaacctggttatctcgagtctttggtagagaaatacctcataaacgaccaatgcatgacctttaccatggtcggtactcccactttcaacaaagagttggacgagaaggaggtggtgcgaaaggacaagaaacttgcccagcttattgaagagcatggatcagttgagaaggctgtcaccaagcttggagaggaggaattggaacttctcaagatccaagaggacgcccataatgctgacctgagctgtctcccatcgttgagagtcaaggacatctcgcgagagaaggaacgcaaacctgtccgagagtcgaaagtcgagggcgctgacgtcgtctggcgtgaagctcccaccaatggcttaacctacttccaggccttgaatgacttcgttgatttgcccgatgaactccgattgcttatgcccctctttaacgactgcgttatgcgtctgggaactgccaatcggtcgatggaacagtgggaagatttgatcaaactgaaaaccggagggatctcaacatcgtcattccttgtgtcgtccccaacgcacttggatcatttcaaggagggtttgcagttctctggattcgctattgacaaaaacattcccgagatgctggaaatactctcggttttggtcacagagacggacttcacaagccctgctgcgcctgcgatgattcaagaacttctacggatgacgactaatggagctttggatgccattgcaggaactggtcaccggtttgctgtcaatgctgcagctgccagtctttctcggagcttctggatccaagagcagcagtctggccttgagcagctacaggctacggctaacctgctccgtgacgcagagtcctctcccgagcgtctccaggagctaatcgagaagcttcgccttatccaatcctttgccatctcttcgtccaaccttcgcgtccgcgtggtgtgtgaaaaggagagtgctggcaacaacgaattgattttgcaaaagtggatttccggactgcctcggacacagtccccaagcgccaatcttaccacgtctgccttcaagtcagccgacaaggctttctacgagatgccgtacaaggtctattattctggccaggctcgccaaactgtgccattcgttgacccatccagcgctcctctcagcatcttgtctcagcttctcacccacaactacctccaccccgagatccgggagaagggaggtgcatacggagccggtgctagcaacggacccatcaagggtatcttcaccttcatgagttaccgagacccgaatcctctaaattcgctcaaggtcttcaaaaacagtggtatattcgctagagatcgtgcttggtctgagcgtgagattgaagaagctaagcttggcatcttccaaggacttgatgctcctatgagcgttgatgacgaaggggcccgctacttcatgagcggcgttacccatgaaatggaccagcgctggagagaacaggtcttggatgttacagccaaggatgtcaacgcggtcgctgagaagttcctggtgaatggctcacggcaagcgacttgtgttctgggtgagaagaaagactgggctgattcggaatgggagctgcgcaagctttccatggatgccgccgcataagcgatatcacccaaggatcgccattcagcagttgcctctttgtttttgcacaccttctccgaactggacatgatccttgtttagggaatttgtatcaccacctcacttccctgtgtatttctatatacttcactttcctccatcacaccctacttcacaccctaccttgtacatatatcgtgtatatcccatttgtatacatctctattcttctgtttcctccctgttttcatgtcttcccctgccttgacccccaacagcgctgaagatattcacgtgcttcggcaccgagctaatcacatctacaaccagtcactacctttggttgcaagatgtcgcattcatttccatcaggatgctcgcgcaagaacaaagggaatgtgaaccgccaggtacacttctcttctccgtttttcagacccgtcctggatttataagtctacacaggacggactaaaaacgagggaacataaatatcgtcatagaattcatagaattcgtaaacttcgtagaaatatcaaagtaaacaaatcttggaatctttcaatgtctttgactaaaagaatgaggaatgataattggtctctgctaaaaagcggagaaatggtgattccccaccgctgataagccccgatataactgtttctctttacttcttctccggttttttgatcagttatcaccgcgagtaatggagagtgactctgagtagccatgaagagatcgggcgccatggtcggcccgaagccgaccaaggcctgtggtgagtccgagacggcattggtattgtagagaaaagctaaccagtcaaagtaaattgccgacgactaaaggtatagacagactactttccaacatactagcaaaaagaccactcacatgaatcagatgaaatgcgaagtatccggacctcctccatgtcgccgttgccgtcacactcgaacagcctgtgtctttaagccccgggccaatgtgagcaaaggatcacggaaacaataacccagaaacaaagctaacacctcgtcgaggcatctgcaatgcatgaattaatggagatgcaacaagatcaagcttttgcttctctgtcagtgatcccggatcatcagtcgattttgaaccggctggccaggatcgaggccgcgctaggtatcactgaggaaccccaggaccccgaagaccaacttagtatgtctcgtgaggcaagtctcgaagaagacacggaagtcgtgccactacatggtgtatggacagcgcttgcgcatttacgactcattactcgtccatctccagatgatagtatctggtcgcgatccgttgttcagcagctatggagctcgtaagcactatttaaatcaagatgtgacggccgatatctaacaatatcacagcttcttgaaaagtctcccacttctgcacttcctaacagatcatagcgcgttcgcttcccctacccctgtcctgctcgcttctgtgctttacatatctgctctacaccatccatctgctaggctggcatctttgaactcggaatattgtaccgctatgtatagtgctatcgctgagcttgtgacaccgtgtctgcgtgcaagttacctgcaggtatcagaacacaaggacgaagaacaaaagctctccccacaatccaaaagagagaaagcatttcatgatatccttgggttaataatggctagtctgagctgcgaggcttatgttggtgccacaggatcgtggattgcaatggcatatcgtatctggcttgatcattgcccagcagagatgaattccaccacgaaagactggcgtggcttgttctccggtcttcaggtaggagcaggtaacaaatcccgagattcggatactttatttacgtttgttggcttcaggtcattgatatcgaacacgcctcaatgcacatgtcctatccactcctcccacgacatgctgcaaatccaaatatacagcggctagatagccatgaaggaaatgccttccaggaccttgcagaaatgatgcactttggactgagtcattttgtcggccgtgggctaccgagcatatggtcctctctcaatgcagatgaggttgacatcgtgcctatagctcggtccccgtttactgaaaatgactcgcaggtcatccggcactgggcacggaaacttgatgactggctggtacgatataataactcatcccgtaagtatccatgagccagaatacaatctccggggctgactgttggtagagcccactccgtctgatcggcaaggtattctcattctgctccagtatcacctgcacaaactatacgtgctttcgatctatcatcctgctcgtggatttgatctcagtcctgcgaatattagttcttttgagcgacacgagttgctcgtttcggctcgggcagtgttgaggctgagacaagatgatgcgagcatatggtctaactgggacttggttgtaagttctgatccagagcctataattctatttttaacaacatagatgatcacatgggcggccgtattacttctccagggtgttgaagacggcatgactcacccagatggtatggcatttcgaaaaacagaattatcgacctcttctaatgttcgttctagatttacacctcatccaagcacatctccaaagtctagaacgaaggaatcagtccgctgcaagcattcatacctttctctcccaccgacttgaatctagtatgcaagctatgcataccccgccagacacaagcgtggcattatcattccctctcccaagcgcagatgactcatggactatatttgaccaagagataatgtctcttgcaaacccaccgtggttattcgatgaatcaacgcagctgccgcagatccaaaaggcttccacaatgcaccaattacagtctgggatccaacctttccagtacgactctgccatttcagcatctgcatcccaacactttgcaccagatacacagtagggttgcacagcggcgaggtgcgggtgttcagccgatcctcggtgtagtataatcaaccccgaaaaggatctagtggtgcacgaagaagcactgattgatgtaatctagaaacatgctatatacaattcaaatcacaaatgatgaaggaactcctacagccttcgaacactaaatctcagcttgaaagtgtccatcccctcatggtagtctttcatcatcttatctgccccagcccatttctccatcctagtctcaacctcccatctcgtccccgtttcagtacccacctgctcccagaacttcttccacgtagaaggatcatgacgatagtgctccccagaggcctccttatcttctggaggtggggggttcactaaaccaatctgtcgcccgattagaagggagccgggtttatcctggagtaacccaacgagccgctttgcgactagaatctgctggtcccaattgaaaagatggaagaaggaagcggcgttcacaatatcgattttgtgggtcagttgcttgactaggtcggaattgtcgtcgaatatgtctgctacaatgaactgggctttgaggtgatcgcggtcgttgaaaagctcatatccaatgtcgtagaagtcttggcgcaagtctgaagcatatagattttcagaagcgaccccgtcgaagacctgatttggtacgttaagttgcattcattgctctagaccctgcatgagctgtctggggtcttaccagttgacgcagctcttgcccgactgcacatccgacatcgagcagcttctggccagacttgagtctatccaggatttcagggtagagcggtgactgtgggatgctcaagtctaggaaccggaatgatccaatacatgggtacggaaactggggataattatcagtatcttcggccaacgagggaatcgtgaagacaattgcgtctgatgaaaaccacacaggccacgcttgtaggacatattgtcgggaagaaatatctaacttaccacagcgaatgctcgatctctctgattcattcgtcattagcgtgggcactctcgccatggaatgaaaaggactcaccacttttttcacatgttcaacctcgtgtcctggtgggattttgctgtacttctcgagcagagactttgctggctcaggaacctcaatcagttctggctcgtaccaggcgaacttatgaggatcaaagccgccatcgagtatggatctgagatcggactcggctttggccatcctggatgagccgaagttcgtctgtggtgcgaagcctgtggtgcaattgagcaatcctgtgcgatttggatatcgcagagcttggctgtgtacttcagtctcgtacctggatagaccggaagagcaattctgttgaggatgccccgcgtggggtgtggggacggccccacggtttggttctaatcgagaatgaagttcatctcaatggaaggtgaagctcatgaagaggactctaattaaagatccgaattcaacattcaaggacgatagcgaagcgacaaaagcaattggatgttgggaactgtgcaggagaaaattggcaagatttgaggaagatctatgagcctagagggggaatctcaaaatcaatcaggtttatcatttgcaatttaaaacgctcgagaactcctggcactctcgagactcttgaattcataggggtatagtaacaaaatcgctcagaatatcatacaaattaggtgatcaatggcaaaggtccacaataatcacccaaagcaaattacagcaatgcgtgtgaagactcgttaacacgatcaatcgagagaagtcgtatttccaccaagctcatgtggagatatagcccttggtgaggatttcgataatcccggagaatccatggccaaagatgaaggcgacatggataggcgtgggaatggctcgagttggttgtcggacaaccggcggcttgatgactcgctgaaggtctttttggaggtattaggttgctcttgtggtcggagacttggactagcggatattgcggcaggctaaaatgtaatctggttaatttcttcttcatttataccggaagatgaaaatctcatactttatcgctgcctcccggatcaaggcctcgactcaaagccagctcgtgtgcagcgagtcgtcttcgcgcaatatccgattcttcttccaatgccgcgcgctgctcttctgtcttcaggtctgccatcgatggtgtaccaacactttgagcaatcgcggcatcattgtaactagtcgaccgctttggggaccgtttcttcttccgctttgtctttctcgaggacgcaccacctagactagacgcggatgcagactgtacaatttcagacttcgccccggactgatcatctgattctaagcccgttccccggcgcgcaaaagcgagcgcaaactcatcatcgaggggcactgcatcttcctcctcgtcactagggaatagatccccgcgggaactaagtgagttgtccgttccgcgagaagattgcgtggtactgcgattcctcctattatggatgggggacaattgatcctcctcatcatcgtcatccatagcctccattagtggctcgtcttcgtgcatatagcgccgggcgccggggtgttcttgcagatctgcagctgaaggacgatacttgactcccctcgcaccgaatctccacggaaagcgctcgaggaagccgaggaatgaagagcttggaatcacagtcgggtcagcgcgattgtccggaatgtgcgcggtgctccttcgcctagtgttttgtgtcccgtagctcatcctcctaggccggcgcggctggtcagcagttccgtgcgccagcccgctgccagcaaggaggcggtcgagttcaccagtaccccatccaattaagccatcatcttcttcttcgttggcccagtcgtcgtaaaagtcaaagttggcttcggtttggccgcgtcgtcgccgccttaggtggtcttcacggctcggaaggcaaggtgctgtacatgcagtcacgcaatttccaatggattcaaaacacggggatatgtagttgtgggagaaagtataaagcccctcttgcgcggtttcgttggcggtctcaaggttatgggagatctgattaatccgttgtcggatgcggggatcgcgcggtcgcatcatattgggcaacgacgtgaagaatagagactactaatgacggatcttgtgtgattcgctccaccagctgtcgccggcgacattggaaaaatgtacggggagtaagcagaggtaagtgaggccgcagcatgaacccgacgatgtcattccttgctgagtcagcgcggataattttggcggaaatttgggtttgatgaagatacgattaggacggagaggcattgagggaggaaagcattgtattctatatctccaagatggtctactatgttagattcctgaaaacccccagaatccaacaacagaaaggggccatctacatctccgctcttatctgcatcaccactgatctaggggactcttttcttgctgaagatgttgatttgatggtgatagctgagaattcctctcgagttatatttcagaaaacgacaaaatggaatgccagtaatcgagaacttgctattaccctgggtcctctcccatccaatctggcccagcagtctatggtgttgacggttaaaatgccggactcaccagaatatgtcataccccagtattcccccatacaattagtggttgctgcaacaagtgctccatttgggcctcattccacaccagcagagaagctggttcaacgccgccttcaatacagcggctgtgaaccattccccatggaaatatgggaagagacaggaaatagcattgctcgacacatatggtaagtcactctgctacttccctttggctttttccctcgagattctaaatacaaattcctagggatgcgggcctagcaacagttacataccttcacctgatgtgtgaggatataaggaagacggcccgtaacaagaacaaaggccctgaacctaaaatacaagctttgaagcaggtcctatccgtctgcaaccgacctatccaggtagttgagcttggggcaggatgtgggatagcgggaattgcattggcatcaatgctcccgaattgttcggtattactcacagatctccctgaggttgaggagataataacacgcaatatgaatgttgcccaactcgcaaccatgtccagtcttcactatcaaaatctcgactgggacgacccaccggatgagctctgcccacggcctattgacctcattcttgtctctgattgtacctacaattcagatagcttgcccgcgctagtctctacgcttgaccgattggttcggacctccccagaggcaatcgtcttggtggctctgaagagacgacatgacagcgaaacggtgtttttcgacttgatgcgctcggcgagatttacggcggtgcaggacagcgttgaaatcccttcgcagcacgatgaggtggatgaaattgagttttactgctacagtcgattaatttagcatgagaatgaccccctgggtggaaagaaaatatacccccaatcaataaaaggacgacgtcgaagcataggtaacaagaagcgagaggatacaacggccctgtatgaaggatctcgtagatgctccaatcacgacaatgcggttttttttcccggaaaatagttctgtaatttataccactatggcgtacaatctacatctgactattgaagatgtctactatcaaacgcagaatacatgctgggatcgcactgacactaatcaggtggagatgagattaagcatcgaggctacgaaacaatttatacaagtgtaacaagaataacatagacgggcatctcacggcatacctcgtttatccttggtttttacattgctaaggtatcttctctggcatctcggtgttttgcttctcggactataaaaggaatcatctagtaagagagggtggatcgttccccaatttaacgatggtcccgaggaccacttacaaaccagcagaattcaaaggtggatatagctatattcataccagaatgaagtcaccgaagaactggaggctaaataagatgatctacgttttgctgactggatgccttgagtcctcggaactcttcgcggtgtacaatttcgggtttggataaagtctatcaagcctctaggtggccgggatcaatacagcaagactattagtgctagcattgggctaaatatgtatgctgcattttctaaatgaccagtcctatctataacataagctgttgatattcttgtggtccgtgcacaaagtggacagctgagtggaatcgagtgggatcaaatgtgcgtcattatgggttctcgcccaaggcctattacccaagagcttgacctcaagcagttctgggcatatgtactgtaactcggcatggtgcatagaactacctgcaagtatatcacatagctctatatggagtacggagtactccgtaggtgcataactaacaatttaaacatcccggtaggacagtacgaacagtactgccacgtatgtacctgaatgtacgaaagtacctgggatctactcccgaggtctgctcggagggcaaatcacagatacacacacacaccgctgccattgaatccagcaattccgagagcatgggatttagctcctgcatcatgcagtcgcacctaggaagagaaagacctatcgcagagccggcgagatggtaataatggatgcctaaacaaggcccaaattaatcgcgcaggcttgtccgaaagagtaatagaggggaagctcgtgaagacggaggagctgaaaagccctggaaaagccctggggagctgaagaaaccctttttccggctgagtcagcaccgctcttttttcctcgaggtagacgaagggcttcgtcatcttttcagggcttctttcaactctccctttttctatttgggtcctacagctcctcattttacaaggtgagtctttttattttcaggttaacttgattgggatccccgtgtgtgactccgtgccgcgttttatttcctcgtgtgccctaagctcgctcactgcccccccaagaaaaatttctcaaaatcaaaaaccctcgatttccccccccccttcctctcactcatactctccccccctcttatagttctcatagcagctggactatatcaggcttgctaaccacgtctctgcccttagatttattcggtcctctaggtcctcttttcagaccctgcctttggaatccccaaaggcgattcggtcaccacggctccagtagcctatcttctggttcttagccaaattgtctccacccaacgtctccgcgacactcttaacaacattccacctcctggtcttttctgaactctcgtccggttcgcctattttcgtcccgttgacgtccccggagattatccccccgttctctgagctgccgcataggacttctttcaaggttcttcctcttcagggggaagggtctaggaggcttggtccagtcaactacggttgtgacacttttcgtcctccctaacgcgcagtcgcctgccgattaaaaactttctatcatctctctatttctattcaaattgtgctgagtcgcagcggcatggttatggcaccgactgcgtgtgtatcgactgctgaagtatgcaccttcagaaaagactataccaatagtctggaccatctcggtcttgtcagcagtcatggcggggacaacaatttgttgcaatcatcgttgactgccaaggagcttgttctggatgtgttgaggaagcgtgcggcggaggtggatttggaccaatgtggtcctggtgaggaggatcctttttacgttgcggatatgggtgaagtctaccgccagcatatgcgctggaagatgaatttgggccgtgtcaagcccttctatggtaggcctcactctttattcgacagcccaccatggacccctgctaatgaacactgaacagctgtcaagtgtaacccggacccagaagtcctccggctcatggcccagcttggaaacggtttcgactgtgcctccaagtctgagatcgatatggcccttcagacgggcattgatcccagccgcattatctatgcgcaaccttgcaagaccaagtcttacctgcgctatgctgccgaggtcggcgtcaagcagatgacctttgacaatgccgatgagttgtacaagatcaaggccaccttccctgaggcggagctctacctccgcatcttgaccgatgactcgaccagcctgtgccggctgagcatgaagttcggtgcttccatggaccaggctcgtccgttgctcgaactggcttataaattggacctcaaggtcgtcggtgtcagtttccacgtcggatctggcgccgaggatccccgggctttcctcgaggccgtgcaggatgcgcgcacagtctttgatcatgcggaagagatcggccacgagctccacactctggatgttggcggcggcttctgccaggacacatttgagaagttcgcgggcattctgggcgaagccgtggacacttatttcccgccaaacatccgtgtgattgccgagcccggtcgctactacgtagccactgcctacactctggccgccaatgtcattgcgcggcgtgacattccgcatcccgatgatccctcgcgcgatgctttcatgttgtatctgaacgacggcgtctatggcaacttttcgaacatcatcttcgatcaccagcatcccgtcgctcagattctcacctgtgcctcggacggctcccagcctgcttccccgaactctgcgacttcggaggacatcacttattctatctggggccctacctgcgatggcatcgatgttataagtgaaagcattgccttgcctggcctgctggacactggcgactggctctattttgaggagatgggagcctacaccaagtgcagcgctacccgttttaacggcttctcggacaaccacgaggtgatctatatttctagtgagcctggtgcttccgctttgctcaactactagtttgaatactgttttgcttcacaatcgtttacaattgtctttttgttggaatcgctttttgtttattgacctctacccggaggaggccgtctaatatagtatctatcgtgcgttctcgctgcatatacgatcgtattttttgccattagattctaaattagaatagagcttgtcgtgtttgcatcaacgtccattgactaggtatcttttggtatcttttctgctggacgttttgctatattgttatcgtcaatgctttcgaacataagatatgaaaagtcttgatatttatttacaggtgtatcatgttctctatcatcacatctacaaggtatcatgagaaactagtccgtaccaacatcacggcatctatgaacaagagctggcctcatcaaaaatctagaccaaacgctccacactcaactccacaccctcttcctcgcctgcctgaatcagcccaccagcttcgagcttcttcttccacttagccgactcgtatcgagcaagaatcaatgtaatgcgggcaatgacagccgggtctgcagactcggcaaccacagcggaaggagtgcaggtccaacgtccaaacgcccaattgagaatataatactgcatgccaggcgactcgagcgtctgtctcgcattcaaatcatccgatgtctccaccggaagatcctggttcgagcagcgaacaatccccttgatgcgatacacctcctcgcgaggcgtcaaagagagaaaccgctcgagagcagcaacatccaccgtcttcccctggacatcggacttcaaaaccacagacagaacctccacctcggactgatgatcatgttgatgcttactctcatgtccattgccagcctcttcctccttaaacaaagccccatcaatacccagcatcacttccatatcaacccgacccttatccgacttaacccaaggtgtctcaatctccaaatcaccaactcggtccagacaaacatcaaaccgctcaggcatatcctcccacttattaaaaacaatcaaatcggtatacttggcctggatctttgccgtgtacgaggtatcctcatatccctcccagttctcgacatctataacactaatcacaccatcgagaacgtaatgtccaccatgctcgcgcgcaagcctgttcacctccatcgcaagcgttgcggggaacgcgctgccgctggtctcgatcacgatgcggtcgggtttcacttcggcgcggagctggtccagtgcgtcgctgacttggccaacgaggttgcagcatatacagccattgagcatttcgcgcacgccgctgatggattgcgttgaggccagttgggagtccacggctacgtcgccgaattcgtttttgaggagggccagcttgtaggtctttggaagttgcgggattaggttgaggaggatggttgttttgcctgagccgaggaagcccgtcacgatggttatggggattggcgccattttggggttgcttggcgacttttgttgagtctgtggttgttgctttctgatgttggcggcgggaggctatcgccgatggaggggcactagccctagtttaggagccctaattacctccttgggattgttgaagaaatataaagcgtatcttccttttaataagaataaagtcaaataacatctctaccagtatcttggaagctcgtagttgttcataggatatacctcgaaatgcgagagttgagattgagtagttgacaagaaaccttccagagtaggtatattttatatagttacatcgcaaggtatgaccaaataggctgtacagtaattcagacctagatgagcatgactgtgcacagactatccgagaaatagcagttacccaaatccagcccataaaccacgatatcgcacgaagtatcaatgtctcgagacggatctattcttcgaacccgttgttcccgtggtcggtctatcgctagccctatcccacgatcgatactcagatcgctcacggcgagagtgacgtgctggtgcaccacggttggtaaccaccgagtggtctgtgtgattgacggactcttggttgtgttcttgatcggattcggcatcgctggaccgattcatacttccggatcgggggcgcattgtgtatgatagagtttgagaagaagagggctcaagttgattattgtgaagtcgaacggtgatggtcctcttttatacaaagtggcggcggtggcacacttgacccaaacattgacatttacttcattgtgaacgcattttgatgcaattgacagagggtccactggaggaattcttttattaacctatttaacgatcgctgcttgggttcatggattgttgaatcctagccggtctgatatattcatgtactttctacctacttaagtagcatagccagaaaccgacaataaagaaagaatgcgaaccaaatagacattcaaattccgagtttgcctaaggacaaagagattcaggatcatgtcatatatccttaaatctcaaggttattttatagtcccagtcccttggtacctccagtcgtatttggttagctgcataccttaaattccaccgaggttccactatgcctcgacattgccccttcgcatacattgcatttcatgacaatagtttttatctacatgactctagaattcacccgcctttgcgaattgtgaataggatattgtctgctgtgaatccattaccatattacttagcagtggaactacttaacctcgtggaaacgcgaccgcagcaattattcggcccgtagatgaacaacccggacgtcaaagcccttcttaccgcaaataccaataatcctttgacccggggactttcaggttgccgtggttcgagtgtacgcgtcctcagggtgagatcgagtgtttctggttgacttcctgggtttggatgtgcgcactcgacagaggatttagagcagctgtctatagcctgagcagtatcaatttggatcgagtctcagcattgccactcaaatagtctcagtctctgcgacatccttattatacatgtgaagtaatcagcgagaatcctgcccccctagagaggagatgcgatcggtgacattcggaatattcaacaagcggcaaaagacacgaattattcagatccccagtcaatggagaataaaatcccaaaacgccaaaaatgtatgatctatctactttgttggctgtgtgtgcttattgctcatatgtctctctcgtaggaaatcgcaaacctgttcgttgctcattttatcaacgcattcgcgttcctcctgggaaggttctaaaatataacactgtcatcagcaatcaagtcatacgtgctgccaggaaactcatgcatgaacatacctggaggtaccatctcctgagcttcatttgatccacctgaaatggcgcgaatgtgaccttgaacggtacgtaaggctccctgcgcagcaggatacgcttcgtccattaaagtatccttcgcggcgatcatcttctcttgggcggcagagctaacggaatttccaaactccgacatggagccaccaggagccatcgagtcgagttgatgtttcatgcccgtaagaacaccttcctgtccttcctgtccttcggctttatggaaagcggcgtcatttgcctccatctcgacctcggattgcctccgttgtccgagtgcaacattggaatccaggtacaatgagtcgctggaggggtttggactcatggtgaagcagtttgctcccttggattgggagtatttttcggattctgggaatgacatgggcgcggagaataacgaagtggaattagaagcaaaaatggtaatggtaaggcgtagggctgagtctgacgtagggctgatatcgggatctgttcgggtctagtatcggagtgggcagggtacaacaatagcgagtagggctattgaccaggattctgcagcaggaatctcttttgggtaattgagtgattgagtgattgacattgtttcgctggacttttccccccgaaagatgttgctgatcgttcctagaaatgacgtcactggaatccacctgcagatgcgttcatcggcaaaggagattcggcgtactctgctctatttttggatactacactattcattcacttccaagtcggaccgaggttctttatcacttgaatttgaactacagttgctctttgctattttcataccgggaaattcaatcatttaatgcaaaatgcacatcatataccgacccgattagttgtagatcgccgcctggaggccaggaatgatctcgagatccttcggcttataggtgtatttcccctcactagaaatcttgacatcccgattctttcgctgctgctgtgtctgtcgaactttaacccactgctcagtcgtcaggtgctgtccaagttcggtgaacgcgttggtagtcaagccaagtctctggaggagggggctgttctgaattgggtcaaggataacgtggttgttggggctatattcattagaccctgaagactccggtgccgcatagccgaaggaacttaccgagcaaaatacaacacacccaatcgatcaatatgagcctggtcagcagggggtgcgtggacccggtgaatactcgacttaatcaagccacccgtgagcgcggtgagggcgtcgcatgtgttgatagtaatggtcccgtcctggggcttgacccacttccattgaccctctgagttcaggatctgaagtgcagctaccggttgtcggaacagaagagtaactgttcccaagtctgtgtggccgggactgtagagctcaccgaccttcttgttatcctcagcgctgcgggctgcataatgcatatagcgcagatgatcctcgcccttgaggtcgtattggtggtcgcggactagttggtcttcgtctggcagctcgagcaggattgcgaagaggcggagaagcttctcaacaacttcggtgtggcatttctttagttcgggtcagttaaaggaatagacgacgatgataaaaggaaaattacccgactgaaagtttcaatctccttaatgttttcggcaatgacagagggctggggacgctcgtggtaaccgtcgaactttggaatattgtatacctggacattatccttgatgccatttcctaagctgagttacgtgttagcgtttctccaatatgtctctgagggcgatctgtttcttacattcggtgccctgcaggacggtaagagttatattcacctctttcaagatcactggcgctgtggaacttgagtttctcttcaagtggcagggcatagaactcccgccctagagcgaactggttgtcgatctcttcatggctaatgttaaagttcttaacgtaaaagaatcctgtttcaagtctgattagcactaagccaaggatcgagcctactcgaattcatatccccggcctcagcacggagcacaaagaagcgtcgactcaccaacatttctaacagcgtgatcgagctgcttgacaagatcttcctttcctccaggttggtcatactgggtaaggtccagtgtgataagctcagcccagtcaactaatcccggagcagtcagcaagacgaaaacaccaagaaatcagcattacccacggtcttccttggtcacagggacctgatcatatttttcaatgtatttgcccggcattttgggcaggctatgagtttccaagaggcgaacaagtatatgcagctacttcaagtagctcgtttccacatcaacaccttaggaaacacacgtcgtatataagtctattcgcacatcattccgacgatatacccccgcatcagatagcggagggattttataagagcacgcaataaattcgtccgatgaggcctgagataacggccaatttccggatttcgtgtggtagaccgggattcgcgcacgccatcatgcagaaacatgtcgtctccgccggcgcatcaaagtgaacggcaaatgtgttagcttcggttccagacgtcctttagcctcgtggatggtctgttttgactattaaaaattcctgaacgagcgatggtgacagcgagtggggaaattggttaacatctctacggctagctggtttttatatgccgagatgctatatcaagagatcctataagtaatggcggtggtctataatttaatgtgctttgtcttttgcacctttaggaacagcatcggacgtctgccgagccttccatgtctgacctgaaacccaaggccgggagattgtcccctctgggacttttcaaggaagtatttaattggtacccatcttcatatcctgccgaggagagaaagtaagcagatcaaggtttgggagagtatctctgtcgatctatactgacgttgccagattattattcaagttggacttgtccattctgatatttgcttgtctctgctgtaagtacacaagtccaaatgatgcacccgagagacgccactaacgaactcagtctttgtcaaatatctgggtaagcctatttccacattcaatgccctttgactcgatgccaatatatcgcagaccagacaaacattagcaatgcatatgttagtggtttgaaagaggacttcggtctgtacggcaatgagctcaactacttcaatgtctgctacttttgttcatatgtgctattccagattcctggactactgctcatgtcacgcccaaagttgtgagtatcaggaattgatctctttctcacccataccaagcgactgactcattctatagggctcgctggttgttacctacactcgaagttctctggggtatttgcacatttgcccaaagccgtgtcacgaacgtacaccagctctatgcccttcgtttcttggttggaatgctagaagcacctgtctttgctggaacgcatttcattctcggtaagttcaaccaatatatgtagtcatctggtatactaaccataaaaaaggttcatggtacacaggtcccgaactgttcaaacgagccggaacatggttcatctgcaacccgctcggtactatggttagtggataccttcaggcagcggcttataccaacctttctggtgttgggggtatgccagggtggaggtggctgttcgtaatcgacggcatatttaccatccccgtggccttgctcggattcctcatctttcccggtattccgggctcgcctaagccattctatctgacggaccgtgatattgaattggccaaggagagaactaagagagccaagattcgccagcctggcaaaatgagtctcgacgtctttaagagaacctttaagagatggcacatttgggtctttatcacttgctacgcgtaagtttggaaaggattcactgctgtagtcaatttactaacgttggttttagatgcatgatcatctgctcctatccaagcagctatatgagcctatggctcaaacaagagggatactcagtgactcaaatcaaccagctgccgactgttacttacgcgattaacatcgtggcctcatggctagggacaacattagctgcgatttatccggaatggatcatttacaccattgcatcggcatgctgtctattctcaacattatgcatgatagtttggaacatccctacaggcctgaagtaagataactccttaactagtcctcagattgagtccgtggtactaacaagcttcttcaaagattcgttgcctggtatgtcttcggagcggctggatgcttgagtccaattctatattccaccatcaatgtgatagtgagggatgatgcggaggagcgtgctctcataatggtacggcaattcctttatccagcggacaaaagaaatcatactgaccagcatctttcttgcattacagggctccatgatgacatttggctattcattcaatatctgggttcctttgctggcatacccaaccgccggccccgacggtgcgcctagatggcgaaagggatggccagtatcatttgtctttttcttcctgctgtgggctggtttcgtaacttctgtttacatatggcgaaggtaaaatcccgtcctgaaatattggtgaatattaaactgacatattattatagggagcaaaggaaacaagccttggtgtcaccccaggaaagtagtgacgaggaaacggacactgtagtagttgatgggaccccgacattgaagaactgaatcaaatctcgtagatggttcgatattgatcaaatattatctaaatatctcggatagatactaataaatggcgtttctcgtaatataaggaatagtccggtaacgacatctgccttacggtatactagggccttgggcggtgatctttaatgaaatttacattgtaatattgggacctgtgaattactgtatccggttagttttgcccttcttggtttagcgccctaatacgccgtcacgtaacctctcttcaatgccctccggcataaaagaccagtcttcgctgctcttcctccctttctcccactttttcatttttctgcctctctattttgcactcatcgccgccccctttcttttactctggcccccaccgagtactgcacatttgctttcagcccgatgtactgcccctttcatttttaccggagatgccgcttgatccgatatccagcttataatgcctatcacctagaatcgtaaccactgggatgatacagcatcctgtccttttgtgtcgatgatcctactccttccctagggcagtgactgagcaccatgctataaagatatctaggtctccctctgctagtgtgcctttctgtctctgactcggcgggcctccctttaaatctgtaaagtgctagtataccctcgacgctatatatccctctcctaccgccctacctaaggttacgttatatagccccggctttatagaatagctcctagttatctggctaaacgcccggttatcgttattgtcggtctctccggtccctttctacctaatcggtgaaaactcgaaatcacagctcggtcatataggctaatagcgaaaatactgtatacgccctagaccttggtcgatgctatatcttgtagttaatacgagactgtaactgcgggaatttttgctagtaaactataacttgttatagactgtgtgactaggatggtctagcgtcctcgactataataggttagattataggatctggttgagattatctactcttagtagaagaagaattctatcctccggcctctatcgttatctataaaagagactacagttccaataatatagtaaaactagaatttaaatcgcctttaaattctcctcttcgcctattccttattctctaccagtatctttattttataagtacctgtagtcaccatatcctaaagagtctttagtcgtctcttcacaatatatgtcaagtataagttttcccttatattttttttagccccggagttacgtataatacctcacccgactagacgctgatccttatactagtagccctttagagataaccccttcgctatagccctcttctggtaaggcgtagtaagatagaccgtagactctttcgaatgaaacactttgatctaataggagaaatgccgtatatatatcggccttacgcgtgacttagtgatttccggataggttggtagatctctgtatcggtagggtacgttttgtctcgtgaatcttgtaaatccgacctactcaaaacgcctagaagaggcagggggcggtaggcaggtataaaaggtcgttagaactcctcagactatggaagaggctaactacctatttatagttccttctcttctattctaatacattgcgtttaaatctttcttgcagtatggaaccgatcaattgaacgatatcatctattatcgtccgcctgctaaaaagaaaaaaaaaaaacgtttcaaactgttccaggcacccggttcctacgcctatatctattcacagttatcttcggatagacctacgccagcccatccgtttctacctagccagtactggcgtccgagtcttttattcccagggcatacgccgttcctctaaactaagactttcgactctcaagacattttgcaattgtaagacataccaggtatcgaatacattaattctataataatgcccgataacatttagacgctaagtatcgatcccctggtttaggatcgtgcgacttagagcctgccgttattaatagtcagtaccactcttaagctatcgattctagactagagagcttctaaacactgaaacaatcgatcccacgatcctcgacgatcatacctttctaggtagtaagtagacatcggcaaagcccagcataggcctaagatttcggcccatggcctaacctatataggctataggcccagctcccctaggcctagcctagcnnnnnnnnnnnnnnnnnnnnnnnnnnnnnnnnnnnnnnnnnnnnnnnnnnnnnnnnnnnnnnnnnnnnnnnnnnnnnnnnnnnnnnnnnnnnnnnnnnnnnnnnnnnnnnnnnnnnnnnnnnnnnnnnnnnnnnnnnnnnnnnnnnnnnnnnnnnnnnnnnnnnnnnnnnnnnnnnnnnnnnnnnnnnnnnnnnnnnnnnnnnnnnnnnnnnnnnnnnnnnnnnnnnnnnnnnnnnnnnnnnnnnnnnnnnnnnnnnnnnnnnnnnnnnnnnnnnnnnnnnnnnnnnnnnnnnnnnnnnnnnnnnnnnnnnnnnnnnnnnnnnnnnnnnnnnnnnnnnnnnnnnnnnnnnnnnnnnnnnnnnnnnnnnnnnnnnnnnnnnnnnnnnnnnnnnnnnnnnnnnnnnnnnnnnnnnnnnnnnnnnnnnnnnnnnnnnnnnnnnnnnnnnnnnnnnnnnnnnnnnnnnnnnnnnnnnnnnnnnnnnnnnnnnnnnnnnnnnnnnnnnnnnnnnnnnnnnnnnnnnnnnnnnnnnnnnnnnnnnnnnnnnnnnnnnnnnnnnnnnnnnnnnnnnnnnnnnnnnnnnnnnnnnnnnnnnnnnnnnnnnnnnnnnnnnnnnnnnnnnnnnnnnnnnnnnnnnnnnnnnnnnnnnnnnnnnnnnnnnnnnnnnnnnnnnnnnnnnnnnnnnnnnnnnnnnnnnnnnnnnnnnnnnnnnnnnnnnnnnnnnnnnnnnnnnnnnnnnnnnnnnnnnnnnnnnnnnnnnnnnnnnnnnnnnnnnnnnnnnnnnnnnnnnnnnnnnnnnnnnnnnnnnnnnnnnnnnnnnnnnnnnnnnnnnnnnnnnnnnnnnnnnnnnnnnnnnnnnnnnnnnnnnnnnnnnnnnnnnnnnnnnnnnnnnnnnnnnnnnnnnnnnnnnnnnnnnnnnnnnnnnnnnnnnnnnnnnnnnnnnnnnnnnnnnnnnnnnnnnnnnnnnnnnnnnnnnnnnnnnnnnnnnnnnnnnnnnnnnnnnnnnnnnnnnnnnnnnnnnnnnnnnnnnnnnnnnnnnnnnnnnnnnnnnnnnnnnnnnnnnnnnnnnnnnnnnnnnnnnnnnnnnnnnnnnnnnnnnnnnnnnnnnnnnnnnnnnnnnnnnnnnnnnnnnnnnnnnnnnnnnnnnnnnnnnnnnnnnnnnnnnnnnnnnnnnnnnnnnnnnnnnnnnnnnnnnnnnnnnnnnnnnnnnnnnnnnnnnnnnnnnnnnnnnnnnnnnnnnnnnnnnnnnnnnnnnnnnnnnnnnnnnnnnnnnnnnnnnnnnnnnnnnnnnnnnnnnnnnnnnnnnnnnnnnnnnnnnnnnnnnnnnnnnnnnnnnnnnnnnnnnnnnnnnnnnnnnnnnnnnnnnnnnnnnnnnnnnnnnnnnnnnnnnnnnnnnnnnnnnnnnnnnnnnnnnnnnnnnnnnnnnnnnnnnnnnnnnnnnnnnnnnnnnnnnnnnnnnnnnnnnnnnnnnnnnnnnnnnnnnnnnnnnnnnnnnnnnnnnnnnnnnnnnnnnnnnnnnnnnnnnnnnnnnnnnnnnnnnnnnnnnnnnnnnnnnnnnnnnnnnnnnnnnnnnnnnnnnnnnnnnnnnnnnnnnnnnnnnnnnnnnnnnnnnnnnnnnnnnnnnnnnnnnnnnnnnnnnnnnnnnnnnnnnnnnnnnnnnnnnnnnnnnnnnnnnnnnnnnnnnnnnnnnnnnnnnnnnnnnnnnnnnnnnnnnnnnnnnnnnnnnnnnnnnnnnnnnnnnnnnnnnnnnnnnnnnnnnnnnnnnnnnnnnnnnnnnnnnnnnnnnnnnnnnnnnnnnnnnnnnnnnnnnnnnnnnnnnnnnnnnnnnnnnnnnnnnnnnnnnnnnnnnnnnnnnnnnnnnnnnnnnnnnnnnnnnnnnnnnnnnnnnnnnnnnnnnnnnnnnnnnnnnnnnnnnnnnnnnnnnnnnnnnnnnnnnnnnnnnnnnnnnnnnnnnnnnnnnnnnnnnnnnnnnnnnnnnnnnnnnnnnnnnnnnnnnnnnnnnnnnnnnnnnnnnnnnnnnnnnnnnnnnnnnnnnnnnnnnnnnnnnnnnnnnnnnnnnnnnnnnnnnnnnnnnnnnnnnnnnnnnnnnnnnnnnnnnnnnnnnnnnnnnnnnnnnnnnnnnnnnnnnnnnnnnnnnnnnnnnnnnnnnnnnnnnnnnnnnnnnnnnnnnnnnnnnnnnnnnnnnnnnnnnnnnnnnnnnnnnnnnnnnnnnnnnnnnnnnnnnnnnnnnnnnnnnnnnnnnnnnnnnnnnnnnnnnnnnnnnnnnnnnnnnnnnnnnnnnnnnnnnnnnnnnnnnnnnnnnnnnnnnnnnnnnnnnnnnnnnnnnnnnnnnnnnnnnnnnnnnnnnnnnnnnnnnnnnnnnnnnnnnnnnnnnnnnnnnnnnnnnnnnnnnnnnnnnnnnnnnnnnnnnnnnnnnnnnnnnnnnnnnnnnnnnnnnnnnnnnnnnnnnnnnnnnnnnnnnnnnnnnnnnnnnnnnnnnnnnnnnnnnnnnnnnnnnnnnnnnnnnnnnnnnnnnnnnnnnnnnnnnnnnnnnnnnnnnnnnnnnnnnnnnnnnnnnnnnnnnnnnnnnnnnnnnnnnnnnnnnnnnnnnnnnnnnnnnnnnnnnnnnnnnnnnnnnnnnnnnnnnnnnnnnnnnnnnnnnnnnnnnnnnnnnnnnnnnnnnnnnnnnnnnnnnnnnnnnnnnnnnnnnnnnnnnnnnnnnnnnnnnnnnnnnnnnnnnnnnnnnnnnnnnnnnnnnnnnnnnnnnnnnnnnnnnnnnnnnnnnnnnnnnnnnnnnnnnnnnnnnnnnnnnnnnnnnnnnnnnnnnnnnnnnnnnnnnnnnnnnnnnnnnnnnnnnnnnnnnnnnnnnnnnnnnnnnnnnnnnnnnnnnnnnnnnnnnnnnnnnnnnnnnnnnnnnnnnnnnnnnnnnnnnnnnnnnnnnnnnnnnnnnnnnnnnnnnnnnnnnnnnnnnnnnnnnnnnnnnnnnnnnnnnnnnnnnnnnnnnnnnnnnnnnnnnnnnnnnnnnnnnnnnnnnnnnnnnnnnnnnnnnnnnnnnnnnnnnnnnnnnnnnnnnnnnnnnnnnnnnnnnnnnnnnnnnnnnnnnnnnnnnnnnnnnnnnnnnnnnnnnnnnnnnnnnnnnnnnnnnnnnnnnnnnnnnnnnnnnnnnnnnnnnnnnnnnnnnnnnnnnnnnnnnnnnnnnnnnnnnnnnnnnnnnnnnnnnnnnnnnnnnnnnnnnnnnnnnnnnnnnnnnnnnnnnnnnnnnnnnnnnnnnnnnnnnnnnnnnnnnnnnnnnnnnnnnnnnnnnnnnnnnnnnnnnnnnnnnnnnnnnnnnnnnnnnnnnnnnnnnnnnnnnnnnnnnnnnnnnnnnnnnnnnnnnnnnnnnnnnnnnnnnnnnnnnnnnnnnnnnnnnnnnnnnnnnnnnnnnnnnnnnnnnnnnnnnnnnnnnnnnnnnnnnnnnnnnnnnnnnnnnnnnnnnnnnnnnnnnnnnnnnnnnnnnnnnnnnnnnnnnnnnnnnnnnnnnnnnnnnnnnnnnnnnnnnnnnnnnnnnnnnnnnnnnnnnnnnnnnnnnnnnnnnnnnnnnnnnnnnnnnnnnnnnnnnnnnnnnnnnnnnnnnnnnnnnnnnnnnnnnnnnnnnnnnnnnnnnnnnnnnnnnnnnnnnnnnnnnnnnnnnnnnnnnnnnnnnnnnnnnnnnnnnnnnnnnnnnnnnnnnnnnnnnnnnnnnnnnnnnnnnnnnnnnnnnnnnnnnnnnnnnnnnnnnnnnnnnnnnnnnnnnnnnnnnnnnnnnnnnnnnnnnnnnnnnnnnnnnnnnnnnnnnnnnnnnnnnnnnnnnnnnnnnnnnnnnnnnnnnnnnnnnnnnnnnnnnnnnnnnnnnnnnnnnnnnnnnnnnnnnnnnnnnnnnnnnnnnnnnnnnnnnnnnnnnnnnnnnnnnnnnnnnnnnnnnnnnnnnnnnnnnnnnnnnnnnnnnnnnnnnnnnnnnnnnnnnnnnnnnnnnnnnnnnnnnnnnnnnnnnnnnnnnnnnnnnnnnnnnnnnnnnnnnnnnnnnnnnnnnnnnnnnnnnnnnnnnnnnnnnnnnnnnnnnnnnnnnnnnnnnnnnnnnnnnnnnnnnnnnnnnnnnnnnnnnnnnnnnnnnnnnnnnnnnnnnnnnnnnnnnnnnnnnnnnnnnnnnnnnnnnnnnnnnnnnnnnnnnnnnnnnnnnnnnnnnnnnnnnnnnnnnnnnnnnnnnnnnnnnnnnnnnnnnnnnnnnnnnnnnnnnnnnnnnnnnnnnnnnnnnnnnnnnnnnnnnnnnnnnnnnnnnnnnnnnnnnnnnnnnnnnnnnnnnnnnnnnnnnnnnnnnnnnnnnnnnnnnnnnnnnnnnnnnnnnnnnnnnnnnnnnnnnnnnnnnnnnnnnnnnnnnnnnnnnnnnnnnnnnnnnnnnnnnnnnnnnnnnnnnnnnnnnnnnnnnnnnnnnnnnnnnnnnnnnnnnnnnnnnnnnnnnnnnnnnnnnnnnnnnnnnnnnnnnnnnnnnnnnnnnnnnnnnnnnnnnnnnnnnnnnnnnnnnnnnnnnnnnnnnnnnnnnnnnnnnnnnnnnnnnnnnnnnnnnnnnnnnnnnnnnnnnnnnnnnnnnnnnnnnnnnnnnnnnnnnnnnnnnnnnnnnnnnnnnnnnnnnnnnnnnnnnnnnnnnnnnnnnnnnnnnnnnnnnnnnnnnnnnnnnnnnnnnnnnnnnnnnnnnnnnnnnnnnnnnnnnnnnnnnnnnnnnnnnnnnnnnnnnnnnnnnnnnnnnnnnnnnnnnnnnnnnnnnnnnnnnnnnnnnnnnnnnnnnnnnnnnnnnnnnnnnnnnnnnnnnnnnnnnnnnnnnnnnnnnnnnnnnnnnnnnnnnnnnnnnnnnnnnnnnnnnnnnnnnnnnnnnnnnnnnnnnnnnnnnnnnnnnnnnnnnnnnnnnnnnnnnnnnnnnnnnnnnnnnnnnnnnnnnnnnnnnnnnnnnnnnnnnnnnnnnnnnnnnnnnnnnnnnnnnnnnnnnnnnnnnnnnnnnnnnnnnnnnnnnnnnnnnnnnnnnnnnnnnnnnnnnnnnnnnnnnnnnnnnnnnnnnnnnnnnnnnnnnnnnnnnnnnnnnnnnnnnnnnnnnnnnnnnnnnnnnnnnnnnnnnnnnnnnnnnnnnnnnnnnnnnnnnnnnnnnnnnnnnnnnnnnnnnnnnnnnnnnnnnnnnnnnnnnnnnnnnnnnnnnnnnnnnnnnnnnnnnnnnnnnnnnnnnnnnnnnnnnnnnnnnnnnnnnnnnnnnnnnnnnnnnnnnnnnnnnnnnnnnnnnnnnnnnnnnnnnnnnnnnnnnnnnnnnnnnnnnnnnnnnnnnnnnnnnnnnnnnnnnnnnnnnnnnnnnnnnnnnnnnnnnnnnnnnnnnnnnnnnnnnnnnnnnnnnnnnnnnnnnnnnnnnnnnnnnnnnnnnnnnnnnnnnnnnnnnnnnnnnnnnnnnnnnnnnnnnnnnnnnnnnnnnnnnnnnnnnnnnnnnnnnnnnnnnnnnnnnnnnnnnnnnnnnnnnnnnnnnnnnnnnnnnnnnnnnnnnnnnnnnnnnnnnnnnnnnnnnnnnnnnnnnnnnnnnnnnnnnnnnnnnnnnnnnnnnnnnnnnnnnnnnnnnnnnnnnnnnnnnnnnnnnnnnnnnnnnnnnnnnnnnnnnnnnnnnnnnnnnnnnnnnnnnnnnnnnnnnnnnnnnnnnnnnnnnnnnnnnnnnnnnnnnnnnnnnnnnnnnnnnnnnnnnnnnnnnnnnnnnnnnnnnnnnnnnnnnnnnnnnnnnnnnnnnnnnnnnnnnnnnnnnnnnnnnnnnnnnnnnnnnnnnnnnnnnnnnnnnnnnnnnnnnnnnnnnnnnnnnnnnnnnnnnnnnnnnnnnnnnnnnnnnnnnnnnnnnnnnnnnnnnnnnnnnnnnnnnnnnnnnnnnnnnnnnnnnnnnnnnnnnnnnnnnnnnnnnnnnnnnnnnnnnnnnnnnnnnnnnnnnnnnnnnnnnnnnnnnnnnnnnnnnnnnnnnnnnnnnnnnnnnnnnnnnnnnnnnnnnnnnnnnnnnnnnnnnnnnnnnnnnnnnnnnnnnnnnnnnnnnnnnnnnnnnnnnnnnnnnnnnnnnnnnnnnnnnnnnnnnnnnnnnnnnnnnnnnnnnnnnnnnnnnnnnnnnnnnnnnnnnnnnnnnnnnnnnnnnnnnnnnnnnnnnnnnnnnnnnnnnnnnnnnnnnnnnnnnnnnnnnnnnnnnnnnnnnnnnnnnnnnnnnnnnnnnnnnnnnnnnnnnnnnnnnnnnnnnnnnnnnnnnnnnnnnnnnnnnnnnnnnnnnnnnnnnnnnnnnnnnnnnnnnnnnnnnnnnnnnnnnnnnnnnnnnnnnnnnnnnnnnnnnnnnnnnnnnnnnnnnnnnnnnnnnnnnnnnnnnnnnnnnnnnnnnnnnnnnnnnnnnnnnnnnnnnnnnnnnnnnnnnnnnnnnnnnnnnnnnnnnnnnnnnnnnnnnnnnnnnnnnnnnnnnnnnnnnnnnnnnnnnnnnnnnnnnnnnnnnnnnnnnnnnnnnnnnnnnnnnnnnnnnnnnnnnnnnnnnnnnnnnnnnnnnnnnnnnnnnnnnnnnnnnnnnnnnnnnnnnnnnnnnnnnnnnnnnnnnnnnnnnnnnnnnnnnnnnnnnnnnnnnnnnnnnnnnnnnnnnnnnnnnnnnnnnnnnnnnnnnnnnnnnnnnnnnnnnnnnnnnnnnnnnnnnnnnnnnnnnnnnnnnnnnnnnnnnnnnnnnnnnnnnnnnnnnnnnnnnnnnnnnnnnnnnnnnnnnnnnnnnnnnnnnnnnnnnnnnnnnnnnnnnnnnnnnnnnnnnnnnnnnnnnnnnnnnnnnnnnnnnnnnnnnnnnnnnnnnnnnnnnnnnnnnnnnnnnnnnnnnnnnnnnnnnnnnnnnnnnnnnnnnnnnnnnnnnnnnnnnnnnnnnnnnnnnnnnnnnnnnnnnnnnnnnnnnnnnnnnnnnnnnnnnnnnnnnnnnnnnnnnnnnnnnnnnnnnnnnnnnnnnnnnnnnnnnnnnnnnnnnnnnnnnnnnnnnnnnnnnnnnnnnnnnnnnnnnnnnnnnnnnnnnnnnnnnnnnnnnnnnnnnnnnnnnnnnnnnnnnnnnnnnnnnnnnnnnnnnnnnnnnnnnnnnnnnnnnnnnnnnnnnnnnnnnnnnnnnnnnnnnnnnnnnnnnnnnnnnnnnnnnnnnnnnnnnnnnnnnnnnnnnnnnnnnnnnnnnnnnnnnnnnnnnnnnnnnnnnnnnnnnnnnnnnnnnnnnnnnnnnnnnnnnnnnnnnnnnnnnnnnnnnnnnnnnnnnnnnnnnnnnnnnnnnnnnnnnnnnnnnnnnnnnnnnnnnnnnnnnnnnnnnnnnnnnnnnnnnnnnnnnnnnnnnnnnnnnnnnnnnnnnnnnnnnnnnnnnnnnnnnnnnnnnnnnnnnnnnnnnnnnnnnnnnnnnnnnnnnnnnnnnnnnnnnnnnnnnnnnnnnnnnnnnnnnnnnnnnnnnnnnnnnnnnnnnnnnnnnnnnnnnnnnnnnnnnnnnnnnnnnnnnnnnnnnnnnnnnnnnnnnnnnnnnnnnnnnnnnnnnnnnnnnnnnnnnnnnnnnnnnnnnnnnnnnnnnnnnnnnnnnnnnnnnnnnnnnnnnnnnnnnnnnnnnnnnnnnnnnnnnnnnnnnnnnnnnnnnnnnnnnnnnnnnnnnnnnnnnnnnnnnnnnnnnnnnnnnnnnnnnnnnnnnnnnnnnnnnnnnnnnnnnnnnnnnnnnnnnnnnnnnnnnnnnnnnnnnnnnnnnnnnnnnnnnnnnnnnnnnnnnnnnnnnnnnnnnnnnnnnnnnnnnnnnnnnnnnnnnnnnnnnnnnnnnnnnnnnnnnnnnnnnnnnnnnnnnnnnnnnnnnnnnnnnnnnnnnnnnnnnnnnnnnnnnnnnnnnnnnnnnnnnnnnnnnnnnnnnnnnnnnnnnnnnnnnnnnnnnnnnnnnnnnnnnnnnnnnnnnnnnnnnnnnnnnnnnnnnnnnnnnnnnnnnnnnnnnnnnnnnnnnnnnnnnnnnnnnnnnnnnnnnnnnnnnnnnnnnnnnnnnnnnnnnnnnnnnnnnnnnnnnnnnnnnnnnnnnnnnnnnnnnnnnnnnnnnnnnnnnnnnnnnnnnnnnnnnnnnnnnnnnnnnnnnnnnnnnnnnnnnnnnnnnnnnnnnnnnnnnnnnnnnnnnnnnnnnnnnnnnnnnnnnnnnnnnnnnnnnnnnnnnnnnnnnnnnnnnnnnnnnnnnnnnnnnnnnnnnnnnnnnnnnnnnnnnnnnnnnnnnnnnnnnnnnnnnnnnnnnnnnnnnnnnnnnnnnnnnnnnnnnnnnnnnnnnnnnnnnnnnnnnnnnnnnnnnnnnnnnnnnnnnnnnnnnnnnnnnnnnnnnnnnnnnnnnnnnnnnnnnnnnnnnnnnnnnnnnnnnnnnnnnnnnnnnnnnnnnnnnnnnnnnnnnnnnnnnnnnnnnnnnnnnnnnnnnnnnnnnnnnnnnnnnnnnnnnnnnnnnnnnnnnnnnnnnnnnnnnnnnnnnnnnnnnnnnnnnnnnnnnnnnnnnnnnnnnnnnnnnnnnnnnnnnnnnnnnnnnnnnnnnnnnnnnnnnnnnnnnnnnnnnnnnnnnnnnnnnnnnnnnnnnnnnnnnnnnnnnnnnnnnnnnnnnnnnnnnnnnnnnnnnnnnnnnnnnnnnnnnnnnnnnnnnnnnnnnnnnnnnnnnnnnnnnnnnnnnnnnnnnnnnnnnnnnnnnnnnnnnnnnnnnnnnnnnnnnnnnnnnnnnnnnnnnnnnnnnnnnnnnnnnnnnnnnnnnnnnnnnnnnnnnnnnnnnnnnnnnnnnnnnnnnnnnnnnnnnnnnnnnnnnnnnnnnnnnnnnnnnnnnnnnnnnnnnnnnnnnnnnnnnnnnnnnnnnnnnnnnnnnnnnnnnnnnnnnnnnnnnnnnnnnnnnnnnnnnnnnnnnnnnnnnnnnnnnnnnnnnnnnnnnnnnnnnnnnnnnnnnnnnnnnnnnnnnnnnnnnnnnnnnnnnnnnnnnnnnnnnnnnnnnnnnnnnnnnnnnnnnnnnnnnnnnnnnnnnnnnnnnnnnnnnnnnnnnnnnnnnnnnnnnnnnnnnnnnnnnnnnnnnnnnnnnnnnnnnnnnnnnnnnnnnnnnnnnnnnnnnnnnnnnnnnnnnnnnnnnnnnnnnnnnnnnnnnnnnnnnnnnnnnnnnnnnnnnnnnnnnnnnnnnnnnnnnnnnnnnnnnnnnnnnnnnnnnnnnnnnnnnnnnnnnnnnnnnnnnnnnnnnnnnnnnnnnnnnnnnnnnnnnnnnnnnnnnnnnnnnnnnnnnnnnnnnnnnnnnnnnnnnnnnnnnnnnnnnnnnnnnnnnnnnnnnnnnnnnnnnnnnnnnnnnnnnnnnnnnnnnnnnnnnnnnnnnnnnnnnnnnnnnnnnnnnnnnnnnnnnnnnnnnnnnnnnnnnnnnnnnnnnnnnnnnnnnnnnnnnnnnnnnnnnnnnnnnnnnnnnnnnnnnnnnnnnnnnnnnnnnnnnnnnnnnnnnnnnnnnnnnnnnnnnnnnnnnnnnnnnnnnnnnnnnnnnnnnnnnnnnnnnnnnnnnnnnnnnnnnnnnnnnnnnnnnnnnnnnnnnnnnnnnnnnnnnnnnnnnnnnnnnnnnnnnnnnnnnnnnnnnnnnnnnnnnnnnnnnnnnnnnnnnnnnnnnnnnnnnnnnnnnnnnnnnnnnnnnnnnnnnnnnnnnnnnnnnnnnnnnnnnnnnnnnnnnnnnnnnnnnnnnnnnnnnnnnnnnnnnnnnnnnnnnnnnnnnnnnnnnnnnnnnnnnnnnnnnnnnnnnnnnnnnnnnnnnnnnnnnnnnnnnnnnnnnnnnnnnnnnnnnnnnnnnnnnnnnnnnnnnnnnnnnnnnnnnnnnnnnnnnnnnnnnnnnnnnnnnnnnnnnnnnnnnnnnnnnnnnnnnnnnnnnnnnnnnnnnnnnnnnnnnnnnnnnnnnnnnnnnnnnnnnnnnnnnnnnnnnnnnnnnnnnnnnnnnnnnnnnnnnnnnnnnnnnnnnnnnnnnnnnnnnnnnnnnnnnnnnnnnnnnnnnnnnnnnnnnnnnnnnnnnnnnnnnnnnnnnnnnnnnnnnnnnnnnnnnnnnnnnnnnnnnnnnnnnnnnnnnnnnnnnnnnnnnnnnnnnnnnnnnnnnnnnnnnnnnnnnnnnnnnnnnnnnnnnnnnnnnnnnnnnnnnnnnnnnnnnnnnnnnnnnnnnnnnnnnnnnnnnnnnnnnnnnnnnnnnnnnnnnnnnnnnnnnnnnnnnnnnnnnnnnnnnnnnnnnnnnnnnnnnnnnnnnnnnnnnnnnnnnnnnnnnnnnnnnnnnnnnnnnnnnnnnnnnnnnnnnnnnnnnnnnnnnnnnnnnnnnnnnnnnnnnnnnnnnnnnnnnnnnnnnnnnnnnnnnnnnnnnnnnnnnnnnnnnnnnnnnnnnnnnnnnnnnnnnnnnnnnnnnnnnnnnnnnnnnnnnnnnnnnnnnnnnnnnnnnnnnnnnnnnnnnnnnnnnnnnnnnnnnnnnnnnnnnnnnnnnnnnnnnnnnnnnnnnnnnnnnnnnnnnnnnnnnnnnnnnnnnnnnnnnnnnnnnnnnnnnnnnnnnnnnnnnnnnnnnnnnnnnnnnnnnnnnnnnnnnnnnnnnnnnnnnnnnnnnnnnnnnnnnnnnnnnnnnnnnnnnnnnnnnnnnnnnnnnnnnnnnnnnnnnnnnnnnnnnnnnnnnnnnnnnnnnnnnnnnnnnnnnnnnnnnnnnnnnnnnnnnnnnnnnnnnnnnnnnnnnnnnnnnnnnnnnnnnnnnnnnnnnnnnnnnnnnnnnnnnnnnnnnnnnnnnnnnnnnnnnnnnnnnnnnnnnnnnnnnnnnnnnnnnnnnnnnnnnnnnnnnnnnnnnnnnnnnnnnnnnnnnnnnnnnnnnnnnnnnnnnnnnnnnnnnnnnnnnnnnnnnnnnnnnnnnnnnnnnnnnnnnnnnnnnnnnnnnnnnnnnnnnnnnnnnnnnnnnnnnnnnnnnnnnnnnnnnnnnnnnnnnnnnnnnnnnnnnnnnnnnnnnnnnnnnnnnnnnnnnnnnnnnnnnnnnnnnnnnnnnnnnnnnnnnnnnnnnnnnnnnnnnnnnnnnnnnnnnnnnnnnnnnnnnnnnnnnnnnnnnnnnnnnnnnnnnnnnnnnnnnnnnnnnnnnnnnnnnnnnnnnnnnnnnnnnnnnnnnnnnnnnnnnnnnnnnnnnnnnnnnnnnnnnnnnnnnnnnnnnnnnnnnnnnnnnnnnnnnnnnnnnnnnnnnnnnnnnnnnnnnnnnnnnnnnnnnnnnnnnnnnnnnnnnnnnnnnnnnnnnnnnnnnnnnnnnnnnnnnnnnnnnnnnnnnnnnnnnnnnnnnnnnnnnnnnnnnnnnnnnnnnnnnnnnnnnnnnnnnnnnnnnnnnnnnnnnnnnnnnnnnnnnnnnnnnnnnnnnnnnnnnnnnnnnnnnnnnnnnnnnnnnnnnnnnnnnnnnnnnnnnnnnnnnnnnnnnnnnnnnnnnnnnnnnnnnnnnnnnnnnnnnnnnnnnnnnnnnnnnnnnnnnnnnnnnnnnnnnnnnnnnnnnnnnnnnnnnnnnnnnnnnnnnnnnnnnnnnnnnnnnnnnnnnnnnnnnnnnnnnnnnnnnnnnnnnnnnnnnnnnnnnnnnnnnnnnnnnnnnnnnnnnnnnnnnnnnnnnnnnnnnnnnnnnnnnnnnnnnnnnnnnnnnnnnnnnnnnnnnnnnnnnnnnnnnnnnnnnnnnnnnnnnnnnnnnnnnnnnnnnnnnnnnnnnnnnnnnnnnnnnnnnnnnnnnnnnnnnnnnnnnnnnnnnnnnnnnnnnnnnnnnnnnnnnnnnnnnnnnnnnnnnnnnnnnnnnnnnnnnnnnnnnnnnnnnnnnnnnnnnnnnnnnnnnnnnnnnnnnnnnnnnnnnnnnnnnnnnnnnnnnnnnnnnnnnnnnnnnnnnnnnnnnnnnnnnnnnnnnnnnnnnnnnnnnnnnnnnnnnnnnnnnnnnnnnnnnnnnnnnnnnnnnnnnnnnnnnnnnnnnnnnnnnnnnnnnnnnnnnnnnnnnnnnnnnnnnnnnnnnnnnnnnnnnnnnnnnnnnnnnnnnnnnnnnnnnnnnnnnnnnnnnnnnnnnnnnnnnnnnnnnnnnnnnnnnnnnnnnnnnnnnnnnnnnnnnnnnnnnnnnnnnnnnnnnnnnnnnnnnnnnnnnnnnnnnnnnnnnnnnnnnnnnnnnnnnnnnnnnnnnnnnnnnnnnnnnnnnnnnnnnnnnnnnnnnnnnnnnnnnnnnnnnnnnnnnnnnnnnnnnnnnnnnnnnnnnnnnnnnnnnnnnnnnnnnnnnnnnnnnnnnnnnnnnnnnnnnnnnnnnnnnnnnnnnnnnnnnnnnnnnnnnnnnnnnnnnnnnnnnnnnnnnnnnnnnnnnnnnnnnnnnnnnnnnnnnnnnnnnnnnnnnnnnnnnnnnnnnnnnnnnnnnnnnnnnnnnnnnnnnnnnnnnnnnnnnnnnnnnnnnnnnnnnnnnnnnnnnnnnnnnnnnnnnnnnnnnnnnnnnnnnnnnnnnnnnnnnnnnnnnnnnnnnnnnnnnnnnnnnnnnnnnnnnnnnnnnnnnnnnnnnnnnnnnnnnnnnnnnnnnnnnnnnnnnnnnnnnnnnnnnnnnnnnnnnnnnnnnnnnnnnnnnnnnnnnnnnnnnnnnnnnnnnnnnnnnnnnnnnnnnnnnnnnnnnnnnnnnnnnnnnnnnnnnnnnnnnnnnnnnnnnnnnnnnnnnnnnnnnnnnnnnnnnnnnnnnnnnnnnnnnnnnnnnnnnnnnnnnnnnnnnnnnnnnnnnnnnnnnnnnnnnnnnnnnnnnnnnnnnnnnnnnnnnnnnnnnnnnnnnnnnnnnnnnnnnnnnnnnnnnnnnnnnnnnnnnnnnnnnnnnnnnnnnnnnnnnnnnnnnnnnnnnnnnnnnnnnnnnnnnnnnnnnnnnnnnnnnnnnnnnnnnnnnnnnnnnnnnnnnnnnnnnnnnnnnnnnnnnnnnnnnnnnnnnnnnnnnnnnnnnnnnnnnnnnnnnnnnnnnnnnnnnnnnnnnnnnnnnnnnnnnnnnnnnnnnnnnnnnnnnnnnnnnnnnnnnnnnnnnnnnnnnnnnnnnnnnnnnnnnnnnnnnnnnnnnnnnnnnnnnnnnnnnnnnnnnnnnnnnnnnnnnnnnnnnnnnnnnnnnnnnnnnnnnnnnnnnnnnnnnnnnnnnnnnnnnnnnnnnnnnnnnnnnnnnnnnnnnnnnnnnnnnnnnnnnnnnnnnnnnnnnnnnnnnnnnnnnnnnnnnnnnnnnnnnnnnnnnnnnnnnnnnnnnnnnnnnnnnnnnnnnnnnnnnnnnnnnnnnnnnnnnnnnnnnnnnnnnnnnnnnnnnnnnnnnnnnnnnnnnnnnnnnnnnnnnnnnnnnnnnnnnnnnnnnnnnnnnnnnnnnnnnnnnnnnnnnnnnnnnnnnnnnnnnnnnnnnnnnnnnnnnnnnnnnnnnnnnnnnnnnnnnnnnnnnnnnnnnnnnnnnnnnnnnnnnnnnnnnnnnnnnnnnnnnnnnnnnnnnnnnnnnnnnnnnnnnnnnnnnnnnnnnnnnnnnnnnnnnnnnnnnnnnnnnnnnnnnnnnnnnnnnnnnnnnnnnnnnnnnnnnnnnnnnnnnnnnnnnnnnnnnnnnnnnnnnnnnnnnnnnnnnnnnnnnnnnnnnnnnnnnnnnnnnnnnnnnnnnnnnnnnnnnnnnnnnnnnnnnnnnnnnnnnnnnnnnnnnnnnnnnnnnnnnnnnnnnnnnnnnnnnnnnnnnnnnnnnnnnnnnnnnnnnnnnnnnnnnnnnnnnnnnnnnnnnnnnnnnnnnnnnnnnnnnnnnnnnnnnnnnnnnnnnnnnnnnnnnnnnnnnnnnnnnnnnnnnnnnnnnnnnnnnnnnnnnnnnnnnnnnnnnnnnnnnnnnnnnnnnnnnnnnnnnnnnnnnnnnnnnnnnnnnnnnnnnnnnnnnnnnnnnnnnnnnnnnnnnnnnnnnnnnnnnnnnnnnnnnnnnnnnnnnnnnnnnnnnnnnnnnnnnnnnnnnnnnnnnnnnnnnnnnnnnnnnnnnnnnnnnnnnnnnnnnnnnnnnnnnnnnnnnnnnnnnnnnnnnnnnnnnnnnnnnnnnnnnnnnnnnnnnnnnnnnnnnnnnnnnnnnnnnnnnnnnnnnnnnnnnnnnnnnnnnnnnnnnnnnnnnnnnnnnnnnnnnnnnnnnnnnnnnnnnnnnnnnnnnnnnnnnnnnnnnnnnnnnnnnnnnnnnnnnnnnnnnnnnnnnnnnnnnnnnnnnnnnnnnnnnnnnnnnnnnnnnnnnnnnnnnnnnnnnnnnnnnnnnnnnnnnnnnnnnnnnnnnnnnnnnnnnnnnnnnnnnnnnnnnnnnnnnnnnnnnnnnnnnnnnnnnnnnnnnnnnnnnnnnnnnnnnnnnnnnnnnnnnnnnnnnnnnnnnnnnnnnnnnnnnnnnnnnnnnnnnnnnnnnnnnnnnnnnnnnnnnnnnnnnnnnnnnnnnnnnnnnnnnnnnnnnnnnnnnnnnnnnnnnnnnnnnnnnnnnnnnnnnnnnnnnnnnnnnnnnnnnnnnnnnnnnnnnnnnnnnnnnnnnnnnnnnnnnnnnnnnnnnnnnnnnnnnnnnnnnnnnnnnnnnnnnnnnnnnnnnnnnnnnnnnnnnnnnnnnnnnnnnnnnnnnnnnnnnnnnnnnnnnnnnnnnnnnnnnnnnnnnnnnnnnnnnnnnnnnnnnnnnnnnnnnnnnnnnnnnnnnnnnnnnnnnnnnnnnnnnnnnnnnnnnnnnnnnnnnnnnnnnnnnnnnnnnnnnnnnnnnnnnnnnnnnnnnnnnnnnnnnnnnnnnnnnnnnnnnnnnnnnnnnnnnnnnnnnnnnnnnnnnnnnnnnnnnnnnnnnnnnnnnnnnnnnnnnnnnnnnnnnnnnnnnnnnnnnnnnnnnnnnnnnnnnnnnnnnnnnnnnnnnnnnnnnnnnnnnnnnnnnnnnnnnnnnnnnnnnnnnnnnnnnnnnnnnnnnnnnnnnnnnnnnnnnnnnnnnnnnnnnnnnnnnnnnnnnnnnnnnnnnnnnnnnnnnnnnnnnnnnnnnnnnnnnnnnnnnnnnnnnnnnnnnnnnnnnnnnnnnnnnnnnnnnnnnnnnnnnnnnnnnnnnnnnnnnnnnnnnnnnnnnnnnnnnnnnnnnnnnnnnnnnnnnnnnnnnnnnnnnnnnnnnnnnnnnnnnnnnnnnnnnnnnnnnnnnnnnnnnnnnnnnnnnnnnnnnnnnnnnnnnnnnnnnnnnnnnnnnnnnnnnnnnnnnnnnnnnnnnnnnnnnnnnnnnnnnnnnnnnnnnnnnnnnnnnnnnnnnnnnnnnnnnnnnnnnnnnnnnnnnnnnnnnnnnnnnnnnnnnnnnnnnnnnnnnnnnnnnnnnnnnnnnnnnnnnnnnnnnnnnnnnnnnnnnnnnnnnnnnnnnnnnnnnnnnnnnnnnnnnnnnnnnnnnnnnnnnnnnnnnnnnnnnnnnnnnnnnnnnnnnnnnnnnnnnnnnnnnnnnnnnnnnnnnnnnnnnnnnnnnnnnnnnnnnnnnnnnnnnnnnnnnnnnnnnnnnnnnnnnnnnnnnnnnnnnnnnnnnnnnnnnnnnnnnnnnnnnnnnnnnnnnnnnnnnnnnnnnnnnnnnnnnnnnnnnnnnnnnnnnnnnnnnnnnnnnnnnnnnnnnnnnnnnnnnnnnnnnnnnnnnnnnnnnnnnnnnnnnnnnnnnnnnnnnnnnnnnnnnnnnnnnnnnnnnnnnnnnnnnnnnnnnnnnnnnnnnnnnnnnnnnnnnnnnnnnnnnnnnnnnnnnnnnnnnnnnnnnnnnnnnnnnnnnnnnnnnnnnnnnnnnnnnnnnnnnnnnnnnnnnnnnnnnnnnnnnnnnnnnnnnnnnnnnnnnnnnnnnnnnnnnnnnnnnnnnnnnnnnnnnnnnnnnnnnnnnnnnnnnnnnnnnnnnnnnnnnnnnnnnnnnnnnnnnnnnnnnnnnnnnnnnnnnnnnnnnnnnnnnnnnnnnnnnnnnnnnnnnnnnnnnnnnnnnnnnnnnnnnnnnnnnnnnnnnnnnnnnnnnnnnnnnnnnnnnnnnnnnnnnnnnnnnnnnnnnnnnnnnnnnnnnnnnnnnnnnnnnnnnnnnnnnnnnnnnnnnnnnnnnnnnnnnnnnnnnnnnnnnnnnnnnnnnnnnnnnnnnnnnnnnnnnnnnnnnnnnnnnnnnnnnnnnnnnnnnnnnnnnnnnnnnnnnnnnnnnnnnnnnnnnnnnnnnnnnnnnnnnnnnnnnnnnnnnnnnnnnnnnnnnnnnnnnnnnnnnnnnnnnnnnnnnnnnnnnnnnnnnnnnnnnnnnnnnnnnnnnnnnnnnnnnnnnnnnnnnnnnnnnnnnnnnnnnnnnnnnnnnnnnnnnnnnnnnnnnnnnnnnnnnnnnnnnnnnnnnnnnnnnnnnnnnnnnnnnnnnnnnnnnnnnnnnnnnnnnnnnnnnnnnnnnnnnnnnnnnnnnnnnnnnnnnnnnnnnnnnnnnnnnnnnnnnnnnnnnnnnnnnnnnnnnnnnnnnnnnnnnnnnnnnnnnnnnnnnnnnnnnnnnnnnnnnnnnnnnnnnnnnnnnnnnnnnnnnnnnnnnnnnnnnnnnnnnnnnnnnnnnnnnnnnnnnnnnnnnnnnnnnnnnnnnnnnnnnnnnnnnnnnnnnnnnnnnnnnnnnnnnnnnnnnnnnnnnnnnnnnnnnnnnnnnnnnnnnnnnnnnnnnnnnnnnnnnnnnnnnnnnnnnnnnnnnnnnnnnnnnnnnnnnnnnnnnnnnnnnnnnnnnnnnnnnnnnnnnnnnnnnnnnnnnnnnnnnnnnnnnnnnnnnnnnnnnnnnnnnnnnnnnnnnnnnnnnnnnnnnnnnnnnnnnnnnnnnnnnnnnnnnnnnnnnnnnnnnnnnnnnnnnnnnnnnnnnnnnnnnnnnnnnnnnnnnnnnnnnnnnnnnnnnnnnnnnnnnnnnnnnnnnnnnnnnnnnnnnnnnnnnnnnnnnnnnnnnnnnnnnnnnnnnnnnnnnnnnnnnnnnnnnnnnnnnnnnnnnnnnnnnnnnnnnnnnnnnnnnnnnnnnnnnnnnnnnnnnnnnnnnnnnnnnnnnnnnnnnnnnnnnnnnnnnnnnnnnnnnnnnnnnnnnnnnnnnnnnnnnnnnnnnnnnnnnnnnnnnnnnnnnnnnnnnnnnnnnnnnnnnnnnnnnnnnnnnnnnnnnnnnnnnnnnnnnnnnnnnnnnnnnnnnnnnnnnnnnnnnnnnnnnnnnnnnnnnnnnnnnnnnnnnnnnnnnnnnnnnnnnnnnnnnnnnnnnnnnnnnnnnnnnnnnnnnnnnnnnnnnnnnnnnnnnnnnnnnnnnnnnnnnnnnnnnnnnnnnnnnnnnnnnnnnnnnnnnnnnnnnnnnnnnnnnnnnnnnnnnnnnnnnnnnnnnnnnnnnnnnnnnnnnnnnnnnnnnnnnnnnnnnnnnnnnnnnnnnnnnnnnnnnnnnnnnnnnnnnnnnnnnnnnnnnnnnnnnnnnnnnnnnnnnnnnnnnnnnnnnnnnnnnnnnnnnnnnnnnnnnnnnnnnnnnnnnnnnnnnnnnnnnnnnnnnnnnnnnnnnnnnnnnnnnnnnnnnnnnnnnnnnnnnnnnnnnnnnnnnnnnnnnnnnnnnnnnnnnnnnnnnnnnnnnnnnnnnnnnnnnnnnnnnnnnnnnnnnnnnnnnnnnnnnnnnnnnnnnnnnnnnnnnnnnnnnnnnnnnnnnnnnnnnnnnnnnnnnnnnnnnnnnnnnnnnnnnnnnnnnnnnnnnnnnnnnnnnnnnnnnnnnnnnnnnnnnnnnnnnnnnnnnnnnnnnnnnnnnnnnnnnnnnnnnnnnnnnnnnnnnnnnnnnnnnnnnnnnnnnnnnnnnnnnnnnnnnnnnnnnnnnnnnnnnnnnnnnnnnnnnnnnnnnnnnnnnnnnnnnnnnnnnnnnnnnnnnnnnnnnnnnnnnnnnnnnnnnnnnnnnnnnnnnnnnnnnnnnnnnnnnnnnnnnnnnnnnnnnnnnnnnnnnnnnnnnnnnnnnnnnnnnnnnnnnnnnnnnnnnnnnnnnnnnnnnnnnnnnnnnnnnnnnnnnnnnnnnnnnnnnnnnnnnnnnnnnnnnnnnnnnnnnnnnnnnnnnnnnnnnnnnnnnnnnnnnnnnnnnnnnnnnnnnnnnnnnnnnnnnnnnnnnnnnnnnnnnnnnnnnnnnnnnnnnnnnnnnnnnnnnnnnnnnnnnnnnnnnnnnnnnnnnnnnnnnnnnnnnnnnnnnnnnnnnnnnnnnnnnnnnnnnnnnnnnnnnnnnnnnnnnnnnnnnnnnnnnnnnnnnnnnnnnnnnnnnnnnnnnnnnnnnnnnnnnnnnnnnnnnnnnnnnnnnnnnnnnnnnnnnnnnnnnnnnnnnnnnnnnnnnnnnnnnnnnnnnnnnnnnnnnnnnnnnnnnnnnnnnnnnnnnnnnnnnnnnnnnnnnnnnnnnnnnnnnnnnnnnnnnnnnnnnnnnnnnnnnnnnnnnnnnnnnnnnnnnnnnnnnnnnnnnnnnnnnnnnnnnnnnnnnnnnnnnnnnnnnnnnnnnnnnnnnnnnnnnnnnnnnnnnnnnnnnnnnnnnnnnnnnnnnnnnnnnnnnnnnnnnnnnnnnnnnnnnnnnnnnnnnnnnnnnnnnnnnnnnnnnnnnnnnnnnnnnnnnnnnnnnnnnnnnnnnnnnnnnnnnnnnnnnnnnnnnnnnnnnnnnnnnnnnnnnnnnnnnnnnnnnnnnnnnnnnnnnnnnnnnnnnnnnnnnnnnnnnnnnnnnnnnnnnnnnnnnnnnnnnnnnnnnnnnnnnnnnnnnnnnnnnnnnnnnnnnnnnnnnnnnnnnnnnnnnnnnnnnnnnnnnnnnnnnnnnnnnnnnnnnnnnnnnnnnnnnnnnnnnnnnnnnnnnnnnnnnnnnnnnnnnnnnnnnnnnnnnnnnnnnnnnnnnnnnnnnnnnnnnnnnnnnnnnnnnnnnnnnnnnnnnnnnnnnnnnnnnnnnnnnnnnnnnnnnnnnnnnnnnnnnnnnnnnnnnnnnnnnnnnnnnnnnnnnnnnnnnnnnnnnnnnnnnnnnnnnnnnnnnnnnnnnnnnnnnnnnnnnnnnnnnnnnnnnnnnnnnnnnnnnnnnnnnnnnnnnnnnnnnnnnnnnnnnnnnnnnnnnnnnnnnnnnnnnnnnnnnnnnnnnnnnnnnnnnnnnnnnnnnnnnnnnnnnnnnnnnnnnnnnnnnnnnnnnnnnnnnnnnnnnnnnnnnnnnnnnnnnnnnnnnnnnnnnnnnnnnnnnnnnnnnnnnnnnnnnnnnnnnnnnnnnnnnnnnnnnnnnnnnnnnnnnnnnnnnnnnnnnnnnnnnnnnnnnnnnnnnnnnnnnnnnnnnnnnnnnnnnnnnnnnnnnnnnnnnnnnnnnnnnnnnnnnnnnnnnnnnnnnnnnnnnnnnnnnnnnnnnnnnnnnnnnnnnnnnnnnnnnnnnnnnnnnnnnnnnnnnnnnnnnnnnnnnnnnnnnnnnnnnnnnnnnnnnnnnnnnnnnnnnnnnnnnnnnnnnnnnnnnnnnnnnnnnnnnnnnnnnnnnnnnnnnnnnnnnnnnnnnnnnnnnnnnnnnnnnnnnnnnnnnnnnnnnnnnnnnnnnnnnnnnnnnnnnnnnnnnnnnnnnnnnnnnnnnnnnnnnnnnnnnnnnnnnnnnnnnnnnnnnnnnnnnnnnnnnnnnnnnnnnnnnnnnnnnnnnnnnnnnnnnnnnnnnnnnnnnnnnnnnnnnnnnnnnnnnnnnnnnnnnnnnnnnnnnnnnnnnnnnnnnnnnnnnnnnnnnnnnnnnnnnnnnnnnnnnnnnnnnnnnnnnnnnnnnnnnnnnnnnnnnnnnnnnnnnnnnnnnnnnnnnnnnnnnnnnnnnnnnnnnnnnnnnnnnnnnnnnnnnnnnnnnnnnnnnnnnnnnnnnnnnnnnnnnnnnnnnnnnnnnnnnnnnnnnnnnnnnnnnnnnnnnnnnnnnnnnnnnnnnnnnnnnnnnnnnnnnnnnnnnnnnnnnnnnnnnnnnnnnnnnnnnnnnnnnnnnnnnnnnnnnnnnnnnnnnnnnnnnnnnnnnnnnnnnnnnnnnnnnnnnnnnnnnnnnnnnnnnnnnnnnnnnnnnnnnnnnnnnnnnnnnnnnnnnnnnnnnnnnnnnnnnnnnnnnnnnnnnnnnnnnnnnnnnnnnnnnnnnnnnnnnnnnnnnnnnnnnnnnnnnnnnnnnnnnnnnnnnnnnnnnnnnnnnnnnnnnnnnnnnnnnnnnnnnnnnnnnnnnnnnnnnnnnnnnnnnnnnnnnnnnnnnnnnnnnnnnnnnnnnnnnnnnnnnnnnnnnnnnnnnnnnnnnnnnnnnnnnnnnnnnnnnnnnnnnnnnnnnnnnnnnnnnnnnnnnnnnnnnnnnnnnnnnnnnnnnnnnnnnnnnnnnnnnnnnnnnnnnnnnnnnnnnnnnnnnnnnnnnnnnnnnnnnnnnnnnnnnnnnnnnnnnnnnnnnnnnnnnnnnnnnnnnnnnnnnnnnnnnnnnnnnnnnnnnnnnnnnnnnnnnnnnnnnnnnnnnnnnnnnnnnnnnnnnnnnnnnnnnnnnnnnnnnnnnnnnnnnnnnnnnnnnnnnnnnnnnnnnnnnnnnnnnnnnnnnnnnnnnnnnnnnnnnnnnnnnnnnnnnnnnnnnnnnnnnnnnnnnnnnnnnnnnnnnnnnnnnnnnnnnnnnnnnnnnnnnnnnnnnnnnnnnnnnnnnnnnnnnnnnnnnnnnnnnnnnnnnnnnnnnnnnnnnnnnnnnnnnnnnnnnnnnnnnnnnnnnnnnnnnnnnnnnnnnnnnnnnnnnnnnnnnnnnnnnnnnnnnnnnnnnnnnnnnnnnnnnnnnnnnnnnnnnnnnnnnnnnnnnnnnnnnnnnnnnnnnnnnnnnnnnnnnnnnnnnnnnnnnnnnnnnnnnnnnnnnnnnnnnnnnnnnnnnnnnnnnnnnnnnnnnnnnnnnnnnnnnnnnnnnnnnnnnnnnnnnnnnnnnnnnnnnnnnnnnnnnnnnnnnnnnnnnnnnnnnnnnnnnnnnnnnnnnnnnnnnnnnnnnnnnnnnnnnnnnnnnnnnnnnnnnnnnnnnnnnnnnnnnnnnnnnnnnnnnnnnnnnnnnnnnnnnnnnnnnnnnnnnnnnnnnnnnnnnnnnnnnnnnnnnnnnnnnnnnnnnnnnnnnnnnnnnnnnnnnnnnnnnnnnnnnnnnnnnnnnnnnnnnnnnnnnnnnnnnnnnnnnnnnnnnnnnnnnnnnnnnnnnnnnnnnnnnnnnnnnnnnnnnnnnnnnnnnnnnnnnnnnnnnnnnnnnnnnnnnnnnnnnnnnnnnnnnnnnnnnnnnnnnnnnnnnnnnnnnnnnnnnnnnnnnnnnnnnnnnnnnnnnnnnnnnnnnnnnnnnnnnnnnnnnnnnnnnnnnnnnnnnnnnnnnnnnnnnnnnnnnnnnnnnnnnnnnnnnnnnnnnnnnnnnnnnnnnnnnnnnnnnnnnnnnnnnnnnnnnnnnnnnnnnnnnnnnnnnnnnnnnnnnnnnnnnnnnnnnnnnnnnnnnnnnnnnnnnnnnnnnnnnnnnnnnnnnnnnnnnnnnnnnnnnnnnnnnnnnnnnnnnnnnnnnnnnnnnnnnnnnnnnnnnnnnnnnnnnnnnnnnnnnnnnnnnnnnnnnnnnnnnnnnnnnnnnnnnnnnnnnnnnnnnnnnnnnnnnnnnnnnnnnnnnnnnnnnnnnnnnnnnnnnnnnnnnnnnnnnnnnnnnnnnnnnnnnnnnnnnnnnnnnnnnnnnnnnnnnnnnnnnnnnnnnnnnnnnnnnnnnnnnnnnnnnnnnnnnnnnnnnnnnnnnnnnnnnnnnnnnnnnnnnnnnnnnnnnnnnnnnnnnnnnnnnnnnnnnnnnnnnnnnnnnnnnnnnnnnnnnnnnnnnnnnnnnnnnnnnnnnnnnnnnnnnnnnnnnnnnnnnnnnnnnnnnnnnnnnnnnnnnnnnnnnnnnnnnnnnnnnnnnnnnnnnnnnnnnnnnnnnnnnnnnnnnnnnnnnnnnnnnnnnnnnnnnnnnnnnnnnnnnnnnnnnnnnnnnnnnnnnnnnnnnnnnnnnnnnnnnnnnnnnnnnnnnnnnnnnnnnnnnnnnnnnnnnnnnnnnnnnnnnnnnnnnnnnnnnnnnnnnnnnnnnnnnnnnnnnnnnnnnnnnnnnnnnnnnnnnnnnnnnnnnnnnnnnnnnnnnnnnnnnnnnnnnnnnnnnnnnnnnnnnnnnnnnnnnnnnnnnnnnnnnnnnnnnnnnnnnnnnnnnnnnnnnnnnnnnnnnnnnnnnnnnnnnnnnnnnnnnnnnnnnnnnnnnnnnnnnnnnnnnnnnnnnnnnnnnnnnnnnnnnnnnnnnnnnnnnnnnnnnnnnnnnnnnnnnnnnnnnnnnnnnnnnnnnnnnnnnnnnnnnnnnnnnnnnnnnnnnnnnnnnnnnnnnnnnnnnnnnnnnnnnnnnnnnnnnnnnnnnnnnnnnnnnnnnnnnnnnnnnnnnnnnnnnnnnnnnnnnnnnnnnnnnnnnnnnnnnnnnnnnnnnnnnnnnnnnnnnnnnnnnnnnnnnnnnnnnnnnnnnnnnnnnnnnnnnnnnnnnnnnnnnnnnnnnnnnnnnnnnnnnnnnnnnnnnnnnnnnnnnnnnnnnnnnnnnnnnnnnnnnnnnnnnnnnnnnnnnnnnnnnnnnnnnnnnnnnnnnnnnnnnnnnnnnnnnnnnnnnnnnnnnnnnnnnnnnnnnnnnnnnnnnnnnnnnnnnnnnnnnnnnnnnnnnnnnnnnnnnnnnnnnnnnnnnnnnnnnnnnnnnnnnnnnnnnnnnnnnnnnnnnnnnnnnnnnnnnnnnnnnnnnnnnnnnnnnnnnnnnnnnnnnnnnnnnnnnnnnnnnnnnnnnnnnnnnnnnnnnnnnnnnnnnnnnnnnnnnnnnnnnnnnnnnnnnnnnnnnnnnnnnnnnnnnnnnnnnnnnnnnnnnnnnnnnnnnnnnnnnnnnnnnnnnnnnnnnnnnnnnnnnnnnnnnnnnnnnnnnnnnnnnnnnnnnnnnnnnnnnnnnnnnnnnnnnnnnnnnnnnnnnnnnnnnnnnnnnnnnnnnnnnnnnnnnnnnnnnnnnnnnnnnnnnnnnnnnnnnnnnnnnnnnnnnnnnnnnnnnnnnnnnnnnnnnnnnnnnnnnnnnnnnnnnnnnnnnnnnnnnnnnnnnnnnnnnnnnnnnnnnnnnnnnnnnnnnnnnnnnnnnnnnnnnnnnnnnnnnnnnnnnnnnnnnnnnnnnnnnnnnnnnnnnnnnnnnnnnnnnnnnnnnnnnnnnnnnnnnnnnnnnnnnnnnnnnnnnnnnnnnnnnnnnnnnnnnnnnnnnnnnnnnnnnnnnnnnnnnnnnnnnnnnnnnnnnnnnnnnnnnnnnnnnnnnnnnnnnnnnnnnnnnnnnnnnnnnnnnnnnnnnnnnnnnnnnnnnnnnnnnnnnnnnnnnnnnnnnnnnnnnnnnnnnnnnnnnnnnnnnnnnnnnnnnnnnnnnnnnnnnnnnnnnnnnnnnnnnnnnnnnnnnnnnnnnnnnnnnnnnnnnnnnnnnnnnnnnnnnnnnnnnnnnnnnnnnnnnnnnnnnnnnnnnnnnnnnnnnnnnnnnnnnnnnnnnnnnnnnnnnnnnnnnnnnnnnnnnnnnnnnnnnnnnnnnnnnnnnnnnnnnnnnnnnnnnnnnnnnnnnnnnnnnnnnnnnnnnnnnnnnnnnnnnnnnnnnnnnnnnnnnnnnnnnnnnnnnnnnnnnnnnnnnnnnnnnnnnnnnnnnnnnnnnnnnnnnnnnnnnnnnnnnnnnnnnnnnnnnnnnnnnnnnnnnnnnnnnnnnnnnnnnnnnnnnnnnnnnnnnnnnnnnnnnnnnnnnnnnnnnnnnnnnnnnnnnnnnnnnnnnnnnnnnnnnnnnnnnnnnnnnnnnnnnnnnnnnnnnnnnnnnnnnnnnnnnnnnnnnnnnnnnnnnnnnnnnnnnnnnnnnnnnnnnnnnnnnnnnnnnnnnnnnnnnnnnnnnnnnnnnnnnnnnnnnnnnnnnnnnnnnnnnnnnnnnnnnnnnnnnnnnnnnnnnnnnnnnnnnnnnnnnnnnnnnnnnnnnnnnnnnnnnnnnnnnnnnnnnnnnnnnnnnnnnnnnnnnnnnnnnnnnnnnnnnnnnnnnnnnnnnnnnnnnnnnnnnnnnnnnnnnnnnnnnnnnnnnnnnnnnnnnnnnnnnnnnnnnnnnnnnnnnnnnnnnnnnnnnnnnnnnnnnnnnnnnnnnnnnnnnnnnnnnnnnnnnnnnnnnnnnnnnnnnnnnnnnnnnnnnnnnnnnnnnnnnnnnnnnnnnnnnnnnnnnnnnnnnnnnnnnnnnnnnnnnnnnnnnnnnnnnnnnnnnnnnnnnnnnnnnnnnnnnnnnnnnnnnnnnnnnnnnnnnnnnnnnnnnnnnnnnnnnnnnnnnnnnnnnnnnnnnnnnnnnnnnnnnnnnnnnnnnnnnnnnnnnnnnnnnnnnnnnnnnnnnnnnnnnnnnnnnnnnnnnnnnnnnnnnnnnnnnnnnnnnnnnnnnnnnnnnnnnnnnnnnnnnnnnnnnnnnnnnnnnnnnnnnnnnnnnnnnnnnnnnnnnnnnnnnnnnnnnnnnnnnnnnnnnnnnnnnnnnnnnnnnnnnnnnnnnnnnnnnnnnnnnnnnnnnnnnnnnnnnnnnnnnnnnnnnnnnnnnnnnnnnnnnnnnnnnnnnnnnnnnnnnnnnnnnnnnnnnnnnnnnnnnnnnnnnnnnnnnnnnnnnnnnnnnnnnnnnnnnnnnnnnnnnnnnnnnnnnnnnnnnnnnnnnnnnnnnnnnnnnnnnnnnnnnnnnnnnnnnnnnnnnnnnnnnnnnnnnnnnnnnnnnnnnnnnnnnnnnnnnnnnnnnnnnnnnnnnnnnnnnnnnnnnnnnnnnnnnnnnnnnnnnnnnnnnnnnnnnnnnnnnnnnnnnnnnnnnnnnnnnnnnnnnnnnnnnnnnnnnnnnnnnnnnnnnnnnnnnnnnnnnnnnnnnnnnnnnnnnnnnnnnnnnnnnnnnnnnnnnnnnnnnnnnnnnnnnnnnnnnnnnnnnnnnnnnnnnnnnnnnnnnnnnnnnnnnnnnnnnnnnnnnnnnnnnnnnnnnnnnnnnnnnnnnnnnnnnnnnnnnnnnnnnnnnnnnnnnnnnnnnnnnnnnnnnnnnnnnnnnnnnnnnnnnnnnnnnnnnnnnnnnnnnnnnnnnnnnnnnnnnnnnnnnnnnnnnnnnnnnnnnnnnnnnnnnnnnnnnnnnnnnnnnnnnnnnnnnnnnnnnnnnnnnnnnnnnnnnnnnnnnnnnnnnnnnnnnnnnnnnnnnnnnnnnnnnnnnnnnnnnnnnnnnnnnnnnnnnnnnnnnnnnnnnnnnnnnnnnnnnnnnnnnnnnnnnnnnnnnnnnnnnnnnnnnnnnnnnnnnnnnnnnnnnnnnnnnnnnnnnnnnnnnnnnnnnnnnnnnnnnnnnnnnnnnnnnnnnnnnnnnnnnnnnnnnnnnnnnnnnnnnnnnnnnnnnnnnnnnnnnnnnnnnnnnnnnnnnnnnnnnnnnnnnnnnnnnnnnnnnnnnnnnnnnnnnnnnnnnnnnnnnnnnnnnnnnnnnnnnnnnnnnnnnnnnnnnnnnnnnnnnnnnnnnnnnnnnnnnnnnnnnnnnnnnnnnnnnnnnnnnnnnnnnnnnnnnnnnnnnnnnnnnnnnnnnnnnnnnnnnnnnnnnnnnnnnnnnnnnnnnnnnnnnnnnnnnnnnnnnnnnnnnnnnnnnnnnnnnnnnnnnnnnnnnnnnnnnnnnnnnnnnnnnnnnnnnnnnnnnnnnnnnnnnnnnnnnnnnnnnnnnnnnnnnnnnnnnnnnnnnnnnnnnnnnnnnnnnnnnnnnnnnnnnnnnnnnnnnnnnnnnnnnnnnnnnnnnnnnnnnnnnnnnnnnnnnnnnnnnnnnnnnnnnnnnnnnnnnnnnnnnnnnnnnnnnnnnnnnnnnnnnnnnnnnnnnnnnnnnnnnnnnnnnnnnnnnnnnnnnnnnnnnnnnnnnnnnnnnnnnnnnnnnnnnnnnnnnnnnnnnnnnnnnnnnnnnnnnnnnnnnnnnnnnnnnnnnnnnnnnnnnnnnnnnnnnnnnnnnnnnnnnnnnnnnnnnnnnnnnnnnnnnnnnnnnnnnnnnnnnnnnnnnnnnnnnnnnnnnnnnnnnnnnnnnnnnnnnnnnnnnnnnnnnnnnnnnnnnnnnnnnnnnnnnnnnnnnnnnnnnnnnnnnnnnnnnnnnnnnnnnnnnnnnnnnnnnnnnnnnnnnnnnnnnnnnnnnnnnnnnnnnnnnnnnnnnnnnnnnnnnnnnnnnnnnnnnnnnnnnnnnnnnnnnnnnnnnnnnnnnnnnnnnnnnnnnnnnnnnnnnnnnnnnnnnnnnnnnnnnnnnnnnnnnnnnnnnnnnnnnnnnnnnnnnnnnnnnnnnnnnnnnnnnnnnnnnnnnnnnnnnnnnnnnnnnnnnnnnnnnnnnnnnnnnnnnnnnnnnnnnnnnnnnnnnnnnnnnnnnnnnnnnnnnnnnnnnnnnnnnnnnnnnnnnnnnnnnnnnnnnnnnnnnnnnnnnnnnnnnnnnnnnnnnnnnnnnnnnnnnnnnnnnnnnnnnnnnnnnnnnnnnnnnnnnnnnnnnnnnnnnnnnnnnnnnnnnnnnnnnnnnnnnnnnnnnnnnnnnnnnnnnnnnnnnnnnnnnnnnnnnnnnnnnnnnnnnnnnnnnnnnnnnnnnnnnnnnnnnnnnnnnnnnnnnnnnnnnnnnnnnnnnnnnnnnnnnnnnnnnnnnnnnnnnnnnnnnnnnnnnnnnnnnnnnnnnnnnnnnnnnnnnnnnnnnnnnnnnnnnnnnnnnnnnnnnnnnnnnnnnnnnnnnnnnnnnnnnnnnnnnnnnnnnnnnnnnnnnnnnnnnnnnnnnnnnnnnnnnnnnnnnnnnnnnnnnnnnnnnnnnnnnnnnnnnnnnnnnnnnnnnnnnnnnnnnnnnnnnnnnnnnnnnnnnnnnnnnnnnnnnnnnnnnnnnnnnnnnnnnnnnnnnnnnnnnnnnnnnnnnnnnnnnnnnnnnnnnnnnnnnnnnnnnnnnnnnnnnnnnnnnnnnnnnnnnnnnnnnnnnnnnnnnnnnnnnnnnnnnnnnnnnnnnnnnnnnnnnnnnnnnnnnnnnnnnnnnnnnnnnnnnnnnnnnnnnnnnnnnnnnnnnnnnnnnnnnnnnnnnnnnnnnnnnnnnnnnnnnnnnnnnnnnnnnnnnnnnnnnnnnnnnnnnnnnnnnnnnnnnnnnnnnnnnnnnnnnnnnnnnnnnnnnnnnnnnnnnnnnnnnnnnnnnnnnnnnnnnnnnnnnnnnnnnnnnnnnnnnnnnnnnnnnnnnnnnnnnnnnnnnnnnnnnnnnnnnnnnnnnnnnnnnnnnnnnnnnnnnnnnnnnnnnnnnnnnnnnnnnnnnnnnnnnnnnnnnnnnnnnnnnnnnnnnnnnnnnnnnnnnnnnnnnnnnnnnnnnnnnnnnnnnnnnnnnnnnnnnnnnnnnnnnnnnnnnnnnnnnnnnnnnnnnnnnnnnnnnnnnnnnnnnnnnnnnnnnnnnnnnnnnnnnnnnnnnnnnnnnnnnnnnnnnnnnnnnnnnnnnnnnnnnnnnnnnnnnnnnnnnnnnnnnnnnnnnnnnnnnnnnnnnnnnnnnnnnnnnnnnnnnnnnnnnnnnnnnnnnnnnnnnnnnnnnnnnnnnnnnnnnnnnnnnnnnnnnnnnnnnnnnnnnnnnnnnnnnnnnnnnnnnnnnnnnnnnnnnnnnnnnnnnnnnnnnnnnnnnnnnnnnnnnnnnnnnnnnnnnnnnnnnnnnnnnnnnnnnnnnnnnnnnnnnnnnnnnnnnnnnnnnnnnnnnnnnnnnnnnnnnnnnnnnnnnnnnnnnnnnnnnnnnnnnnnnnnnnnnnnnnnnnnnnnnnnnnnnnnnnnnnnnnnnnnnnnnnnnnnnnnnnnnnnnnnnnnnnnnnnnnnnnnnnnnnnnnnnnnnnnnnnnnnnnnnnnnnnnnnnnnnnnnnnnnnnnnnnnnnnnnnnnnnnnnnnnnnnnnnnnnnnnnnnnnnnnnnnnnnnnnnnnnnnnnnnnnnnnnnnnnnnnnnnnnnnnnnnnnnnnnnnnnnnnnnnnnnnnnnnnnnnnnnnnnnnnnnnnnnnnnnnnnnnnnnnnnnnnnnnnnnnnnnnnnnnnnnnnnnnnnnnnnnnnnnnnnnnnnnnnnnnnnnnnnnnnnnnnnnnnnnnnnnnnnnnnnnnnnnnnnnnnnnnnnnnnnnnnnnnnnnnnnnnnnnnnnnnnnnnnnnnnnnnnnnnnnnnnnnnnnnnnnnnnnnnnnnnnnnnnnnnnnnnnnnnnnnnnnnnnnnnnnnnnnnnnnnnnnnnnnnnnnnnnnnnnnnnnnnnnnnnnnnnnnnnnnnnnnnnnnnnnnnnnnnnnnnnnnnnnnnnnnnnnnnnnnnnnnnnnnnnnnnnnnnnnnnnnnnnnnnnnnnnnnnnnnnnnnnnnnnnnnnnnnnnnnnnnnnnnnnnnnnnnnnnnnnnnnnnnnnnnnnnnnnnnnnnnnnnnnnnnnnnnnnnnnnnnnnnnnnnnnnnnnnnnnnnnnnnnnnnnnnnnnnnnnnnnnnnnnnnnnnnnnnnnnnnnnnnnnnnnnnnnnnnnnnnnnnnnnnnnnnnnnnnnnnnnnnnnnnnnnnnnnnnnnnnnnnnnnnnnnnnnnnnnnnnnnnnnnnnnnnnnnnnnnnnnnnnnnnnnnnnnnnnnnnnnnnnnnnnnnnnnnnnnnnnnnnnnnnnnnnnnnnnnnnnnnnnnnnnnnnnnnnnnnnnnnnnnnnnnnnnnnnnnnnnnnnnnnnnnnnnnnnnnnnnnnnnnnnnnnnnnnnnnnnnnnnnnnnnnnnnnnnnnnnnnnnnnnnnnnnnnnnnnnnnnnnnnnnnnnnnnnnnnnnnnnnnnnnnnnnnnnnnnnnnnnnnnnnnnnnnnnnnnnnnnnnnnnnnnnnnnnnnnnnnnnnnnnnnnnnnnnnnnnnnnnnnnnnnnnnnnnnnnnnnnnnnnnnnnnnnnnnnnnnnnnnnnnnnnnnnnnnnnnnnnnnnnnnnnnnnnnnnnnnnnnnnnnnnnnnnnnnnnnnnnnnnnnnnnnnnnnnnnnnnnnnnnnnnnnnnnnnnnnnnnnnnnnnnnnnnnnnnnnnnnnnnnnnnnnnnnnnnnnnnnnnnnnnnnnnnnnnnnnnnnnnnnnnnnnnnnnnnnnnnnnnnnnnnnnnnnnnnnnnnnnnnnnnnnnnnnnnnnnnnnnnnnnnnnnnnnnnnnnnnnnnnnnnnnnnnnnnnnnnnnnnnnnnnnnnnnnnnnnnnnnnnnnnnnnnnnnnnnnnnnnnnnnnnnnnnnnnnnnnnnnnnnnnnnnnnnnnnnnnnnnnnnnnnnnnnnnnnnnnnnnnnnnnnnnnnnnnnnnnnnnnnnnnnnnnnnnnnnnnnnnnnnnnnnnnnnnnnnnnnnnnnnnnnnnnnnnnnnnnnnnnnnnnnnnnnnnnnnnnnnnnnnnnnnnnnnnnnnnnnnnnnnnnnnnnnnnnnnnnnnnnnnnnnnnnnnnnnnnnnnnnnnnnnnnnnnnnnnnnnnnnnnnnnnnnnnnnnnnnnnnnnnnnnnnnnnnnnnnnnnnnnnnnnnnnnnnnnnnnnnnnnnnnnnnnnnnnnnnnnnnnnnnnnnnnnnnnnnnnnnnnnnnnnnnnnnnnnnnnnnnnnnnnnnnnnnnnnnnnnnnnnnnnnnnnnnnnnnnnnnnnnnnnnnnnnnnnnnnnnnnnnnnnnnnnnnnnnnnnnnnnnnnnnnnnnnnnnnnnnnnnnnnnnnnnnnnnnnnnnnnnnnnnnnnnnnnnnnnnnnnnnnnnnnnnnnnnnnnnnnnnnnnnnnnnnnnnnnnnnnnnnnnnnnnnnnnnnnnnnnnnnnnnnnnnnnnnnnnnnnnnnnnnnnnnnnnnnnnnnnnnnnnnnnnnnnnnnnnnnnnnnnnnnnnnnnnnnnnnnnnnnnnnnnnnnnnnnnnnnnnnnnnnnnnnnnnnnnnnnnnnnnnnnnnnnnnnnnnnnnnnnnnnnnnnnnnnnnnnnnnnnnnnnnnnnnnnnnnnnnnnnnnnnnnnnnnnnnnnnnnnnnnnnnnnnnnnnnnnnnnnnnnnnnnnnnnnnnnnnnnnnnnnnnnnnnnnnnnnnnnnnnnnnnnnnnnnnnnnnnnnnnnnnnnnnnnnnnnnnnnnnnnnnnnnnnnnnnnnnnnnnnnnnnnnnnnnnnnnnnnnnnnnnnnnnnnnnnnnnnnnnnnnnnnnnnnnnnnnnnnnnnnnnnnnnnnnnnnnnnnnnnnnnnnnnnnnnnnnnnnnnnnnnnnnnnnnnnnnnnnnnnnnnnnnnnnnnnnnnnnnnnnnnnnnnnnnnnnnnnnnnnnnnnnnnnnnnnnnnnnnnnnnnnnnnnnnnnnnnnnnnnnnnnnnnnnnnnnnnnnnnnnnnnnnnnnnnnnnnnnnnnnnnnnnnnnnnnnnnnnnnnnnnnnnnnnnnnnnnnnnnnnnnnnnnnnnnnnnnnnnnnnnnnnnnnnnnnnnnnnnnnnnnnnnnnnnnnnnnnnnnnnnnnnnnnnnnnnnnnnnnnnnnnnnnnnnnnnnnnnnnnnnnnnnnnnnnnnnnnnnnnnnnnnnnnnnnnnnnnnnnnnnnnnnnnnnnnnnnnnnnnnnnnnnnnnnnnnnnnnnnnnnnnnnnnnnnnnnnnnnnnnnnnnnnnnnnnnnnnnnnnnnnnnnnnnnnnnnnnnnnnnnnnnnnnnnnnnnnnnnnnnnnnnnnnnnnnnnnnnnnnnnnnnnnnnnnnnnnnnnnnnnnnnnnnnnnnnnnnnnnnnnnnnnnnnnnnnnnnnnnnnnnnnnnnnnnnnnnnnnnnnnnnnnnnnnnnnnnnnnnnnnnnnnnnnnnnnnnnnnnnnnnnnnnnnnnnnnnnnnnnnnnnnnnnnnnnnnnnnnnnnnnnnnnnnnnnnnnnnnnnnnnnnnnnnnnnnnnnnnnnnnnnnnnnnnnnnnnnnnnnnnnnnnnnnnnnnnnnnnnnnnnnnnnnnnnnnnnnnnnnnnnnnnnnnnnnnnnnnnnnnnnnnnnnnnnnnnnnnnnnnnnnnnnnnnnnnnnnnnnnnnnnnnnnnnnnnnnnnnnnnnnnnnnnnnnnnnnnnnnnnnnnnnnnnnnnnnnnnnnnnnnnnnnnnnnnnnnnnnnnnnnnnnnnnnnnnnnnnnnnnnnnnnnnnnnnnnnnnnnnnnnnnnnnnnnnnnnnnnnnnnnnnnnnnnnnnnnnnnnnnnnnnnnnnnnnnnnnnnnnnnnnnnnnnnnnnnnnnnnnnnnnnnnnnnnnnnnnnnnnnnnnnnnnnnnnnnnnnnnnnnnnnnnnnnnnnnnnnnnnnnnnnnnnnnnnnnnnnnnnnnnnnnnnnnnnnnnnnnnnnnnnnnnnnnnnnnnnnnnnnnnnnnnnnnnnnnnnnnnnnnnnnnnnnnnnnnnnnnnnnnnnnnnnnnnnnnnnnnnnnnnnnnnnnnnnnnnnnnnnnnnnnnnnnnnnnnnnnnnnnnnnnnnnnnnnnnnnnnnnnnnnnnnnnnnnnnnnnnnnnnnnnnnnnnnnnnnnnnnnnnnnnnnnnnnnnnnnnnnnnnnnnnnnnnnnnnnnnnnnnnnnnnnnnnnnnnnnnnnnnnnnnnnnnnnnnnnnnnnnnnnnnnnnnnnnnnnnnnnnnnnnnnnnnnnnnnnnnnnnnnnnnnnnnnnnnnnnnnnnnnnnnnnnnnnnnnnnnnnnnnnnnnnnnnnnnnnnnnnnnnnnnnnnnnnnnnnnnnnnnnnnnnnnnnnnnnnnnnnnnnnnnnnnnnnnnnnnnnnnnnnnnnnnnnnnnnnnnnnnnnnnnnnnnnnnnnnnnnnnnnnnnnnnnnnnnnnnnnnnnnnnnnnnnnnnnnnnnnnnnnnnnnnnnnnnnnnnnnnnnnnnnnnnnnnnnnnnnnnnnnnnnnnnnnnnnnnnnnnnnnnnnnnnnnnnnnnnnnnnnnnnnnnnnnnnnnnnnnnnnnnnnnnnnnnnnnnnnnnnnnnnnnnnnnnnnnnnnnnnnnnnnnnnnnnnnnnnnnnnnnnnnnnnnnnnnnnnnnnnnnnnnnnnnnnnnnnnnnnnnnnnnnnnnnnnnnnnnnnnnnnnnnnnnnnnnnnnnnnnnnnnnnnnnnnnnnnnnnnnnnnnnnnnnnnnnnnnnnnnnnnnnnnnnnnnnnnnnnnnnnnnnnnnnnnnnnnnnnnnnnnnnnnnnnnnnnnnnnnnnnnnnnnnnnnnnnnnnnnnnnnnnnnnnnnnnnnnnnnnnnnnnnnnnnnnnnnnnnnnnnnnnnnnnnnnnnnnnnnnnnnnnnnnnnnnnnnnnnnnnnnnnnnnnnnnnnnnnnnnnnnnnnnnnnnnnnnnnnnnnnnnnnnnnnnnnnnnnnnnnnnnnnnnnnnnnnnnnnnnnnnnnnnnnnnnnnnnnnnnnnnnnnnnnnnnnnnnnnnnnnnnnnnnnnnnnnnnnnnnnnnnnnnnnnnnnnnnnnnnnnnnnnnnnnnnnnnnnnnnnnnnnnnnnnnnnnnnnnnnnnnnnnnnnnnnnnnnnnnnnnnnnnnnnnnnnnnnnnnnnnnnnnnnnnnnnnnnnnnnnnnnnnnnnnnnnnnnnnnnnnnnnnnnnnnnnnnnnnnnnnnnnnnnnnnnnnnnnnnnnnnnnnnnnnnnnnnnnnnnnnnnnnnnnnnnnnnnnnnnnnnnnnnnnnnnnnnnnnnnnnnnnnnnnnnnnnnnnnnnnnnnnnnnnnnnnnnnnnnnnnnnnnnnnnnnnnnnnnnnnnnnnnnnnnnnnnnnnnnnnnnnnnnnnnnnnnnnnnnnnnnnnnnnnnnnnnnnnnnnnnnnnnnnnnnnnnnnnnnnnnnnnnnnnnnnnnnnnnnnnnnnnnnnnnnnnnnnnnnnnnnnnnnnnnnnnnnnnnnnnnnnnnnnnnnnnnnnnnnnnnnnnnnnnnnnnnnnnnnnnnnnnnnnnnnnnnnnnnnnnnnnnnnnnnnnnnnnnnnnnnnnnnnnnnnnnnnnnnnnnnnnnnnnnnnnnnnnnnnnnnnnnnnnnnnnnnnnnnnnnnnnnnnnnnnnnnnnnnnnnnnnnnnnnnnnnnnnnnnnnnnnnnnnnnnnnnnnnnnnnnnnnnnnnnnnnnnnnnnnnnnnnnnnnnnnnnnnnnnnnnnnnnnnnnnnnnnnnnnnnnnnnnnnnnnnnnnnnnnnnnnnnnnnnnnnnnnnnnnnnnnnnnnnnnnnnnnnnnnnnnnnnnnnnnnnnnnnnnnnnnnnnnnnnnnnnnnnnnnnnnnnnnnnnnnnnnnnnnnnnnnnnnnnnnnnnnnnnnnnnnnnnnnnnnnnnnnnnnnnnnnnnnnnnnnnnnnnnnnnnnnnnnnnnnnnnnnnnnnnnnnnnnnnnnnnnnnnnnnnnnnnnnnnnnnnnnnnnnnnnnnnnnnnnnnnnnnnnnnnnnnnnnnnnnnnnnnnnnnnnnnnnnnnnnnnnnnnnnnnnnnnnnnnnnnnnnnnnnnnnnnnnnnnnnnnnnnnnnnnnnnnnnnnnnnnnnnnnnnnnnnnnnnnnnnnnnnnnnnnnnnnnnnnnnnnnnnnnnnnnnnnnnnnnnnnnnnnnnnnnnnnnnnnnnnnnnnnnnnnnnnnnnnnnnnnnnnnnnnnnnnnnnnnnnnnnnnnnnnnnnnnnnnnnnnnnnnnnnnnnnnnnnnnnnnnnnnnnnnnnnnnnnnnnnnnnnnnnnnnnnnnnnnnnnnnnnnnnnnnnnnnnnnnnnnnnnnnnnnnnnnnnnnnnnnnnnnnnnnnnnnnnnnnnnnnnnnnnnnnnnnnnnnnnnnnnnnnnnnnnnnnnnnnnnnnnnnnnnnnnnnnnnnnnnnnnnnnnnnnnnnnnnnnnnnnnnnnnnnnnnnnnnnnnnnnnnnnnnnnnnnnnnnnnnnnnnnnnnnnnnnnnnnnnnnnnnnnnnnnnnnnnnnnnnnnnnnnnnnnnnnnnnnnnnnnnnnnnnnnnnnnnnnnnnnnnnnnnnnnnnnnnnnnnnnnnnnnnnnnnnnnnnnnnnnnnnnnnnnnnnnnnnnnnnnnnnnnnnnnnnnnnnnnnnnnnnnnnnnnnnnnnnnnnnnnnnnnnnnnnnnnnnnnnnnnnnnnnnnnnnnnnnnnnnnnnnnnnnnnnnnnnnnnnnnnnnnnnnnnnnnnnnnnnnnnnnnnnnnnnnnnnnnnnnnnnnnnnnnnnnnnnnnnnnnnnnnnnnnnnnnnnnnnnnnnnnnnnnnnnnnnnnnnnnnnnnnnnnnnnnnnnnnnnnnnnnnnnnnnnnnnnnnnnnnnnnnnnnnnnnnnnnnnnnnnnnnnnnnnnnnnnnnnnnnnnnnnnnnnnnnnnnnnnnnnnnnnnnnnnnnnnnnnnnnnnnnnnnnnnnnnnnnnnnnnnnnnnnnnnnnnnnnnnnnnnnnnnnnnnnnnnnnnnnnnnnnnnnnnnnnnnnnnnnnnnnnnnnnnnnnnnnnnnnnnnnnnnnnnnnnnnnnnnnnnnnnnnnnnnnnnnnnnnnnnnnnnnnnnnnnnnnnnnnnnnnnnnnnnnnnnnnnnnnnnnnnnnnnnnnnnnnnnnnnnnnnnnnnnnnnnnnnnnnnnnnnnnnnnnnnnnnnnnnnnnnnnnnnnnnnnnnnnnnnnnnnnnnnnnnnnnnnnnnnnnnnnnnnnnnnnnnnnnnnnnnnnnnnnnnnnnnnnnnnnnnnnnnnnnnnnnnnnnnnnnnnnnnnnnnnnnnnnnnnnnnnnnnnnnnnnnnnnnnnnnnnnnnnnnnnnnnnnnnnnnnnnnnnnnnnnnnnnnnnnnnnnnnnnnnnnnnnnnnnnnnnnnnnnnnnnnnnnnnnnnnnnnnnnnnnnnnnnnnnnnnnnnnnnnnnnnnnnnnnnnnnnnnnnnnnnnnnnnnnnnnnnnnnnnnnnnnnnnnnnnnnnnnnnnnnnnnnnnnnnnnnnnnnnnnnnnnnnnnnnnnnnnnnnnnnnnnnnnnnnnnnnnnnnnnnnnnnnnnnnnnnnnnnnnnnnnnnnnnnnnnnnnnnnnnnnnnnnnnnnnnnnnnnnnnnnnnnnnnnnnnnnnnnnnnnnnnnnnnnnnnnnnnnnnnnnnnnnnnnnnnnnnnnnnnnnnnnnnnnnnnnnnnnnnnnnnnnnnnnnnnnnnnnnnnnnnnnnnnnnnnnnnnnnnnnnnnnnnnnnnnnnnnnnnnnnnnnnnnnnnnnnnnnnnnnnnnnnnnnnnnnnnnnnnnnnnnnnnnnnnnnnnnnnnnnnnnnnnnnnnnnnnnnnnnnnnnnnnnnnnnnnnnnnnnnnnnnnnnnnnnnnnnnnnnnnnnnnnnnnnnnnnnnnnnnnnnnnnnnnnnnnnnnnnnnnnnnnnnnnnnnnnnnnnnnnnnnnnnnnnnnnnnnnnnnnnnnnnnnnnnnnnnnnnnnnnnnnnnnnnnnnnnnnnnnnnnnnnnnnnnnnnnnnnnnnnnnnnnnnnnnnnnnnnnnnnnnnnnnnnnnnnnnnnnnnnnnnnnnnnnnnnnnnnnnnnnnnnnnnnnnnnnnnnnnnnnnnnnnnnnnnnnnnnnnnnnnnnnnnnnnnnnnnnnnnnnnnnnnnnnnnnnnnnnnnnnnnnnnnnnnnnnnnnnnnnnnnnnnnnnnnnnnnnnnnnnnnnnnnnnnnnnnnnnnnnnnnnnnnnnnnnnnnnnnnnnnnnnnnnnnnnnnnnnnnnnnnnnnnnnnnnnnnnnnnnnnnnnnnnnnnnnnnnnnnnnnnnnnnnnnnnnnnnnnnnnnnnnnnnnnnnnnnnnnnnnnnnnnnnnnnnnnnnnnnnnnnnnnnnnnnnnnnnnnnnnnnnnnnnnnnnnnnnnnnnnnnnnnnnnnnnnnnnnnnnnnnnnnnnnnnnnnnnnnnnnnnnnnnnnnnnnnnnnnnnnnnnnnnnnnnnnnnnnnnnnnnnnnnnnnnnnnnnnnnnnnnnnnnnnnnnnnnnnnnnnnnnnnnnnnnnnnnnnnnnnnnnnnnnnnnnnnnnnnnnnnnnnnnnnnnnnnnnnnnnnnnnnnnnnnnnnnnnnnnnnnnnnnnnnnnnnnnnnnnnnnnnnnnnnnnnnnnnnnnnnnnnnnnnnnnnnnnnnnnnnnnnnnnnnnnnnnnnnnnnnnnnnnnnnnnnnnnnnnnnnnnnnnnnnnnnnnnnnnnnnnnnnnnnnnnnnnnnnnnnnnnnnnnnnnnnnnnnnnnnnnnnnnnnnnnnnnnnnnnnnnnnnnnnnnnnnnnnnnnnnnnnnnnnnnnnnnnnnnnnnnnnnnnnnnnnnnnnnnnnnnnnnnnnnnnnnnnnnnnnnnnnnnnnnnnnnnnnnnnnnnnnnnnnnnnnnnnnnnnnnnnnnnnnnnnnnnnnnnnnnnnnnnnnnnnnnnnnnnnnnnnnnnnnnnnnnnnnnnnnnnnnnnnnnnnnnnnnnnnnnnnnnnnnnnnnnnnnnnnnnnnnnnnnnnnnnnnnnnnnnnnnnnnnnnnnnnnnnnnnnnnnnnnnnnnnnnnnnnnnnnnnnnnnnnnnnnnnnnnnnnnnnnnnnnnnnnnnnnnnnnnnnnnnnnnnnnnnnnnnnnnnnnnnnnnnnnnnnnnnnnnnnnnnnnnnnnnnnnnnnnnnnnnnnnnnnnnnnnnnnnnnnnnnnnnnnnnnnnnnnnnnnnnnnnnnnnnnnnnnnnnnnnnnnnnnnnnnnnnnnnnnnnnnnnnnnnnnnnnnnnnnnnnnnnnnnnnnnnnnnnnnnnnnnnnnnnnnnnnnnnnnnnnnnnnnnnnnnnnnnnnnnnnnnnnnnnnnnnnnnnnnnnnnnnnnnnnnnnnnnnnnnnnnnnnnnnnnnnnnnnnnnnnnnnnnnnnnnnnnnnnnnnnnnnnnnnnnnnnnnnnnnnnnnnnnnnnnnnnnnnnnnnnnnnnnnnnnnnnnnnnnnnnnnnnnnnnnnnnnnnnnnnnnnnnnnnnnnnnnnnnnnnnnnnnnnnnnnnnnnnnnnnnnnnnnnnnnnnnnnnnnnnnnnnnnnnnnnnnnnnnnnnnnnnnnnnnnnnnnnnnnnnnnnnnnnnnnnnnnnnnnnnnnnnnnnnnnnnnnnnnnnnnnnnnnnnnnnnnnnnnnnnnnnnnnnnnnnnnnnnnnnnnnnnnnnnnnnnnnnnnnnnnnnnnnnnnnnnnnnnnnnnnnnnnnnnnnnnnnnnnnnnnnnnnnnnnnnnnnnnnnnnnnnnnnnnnnnnnnnnnnnnnnnnnnnnnnnnnnnnnnnnnnnnnnnnnnnnnnnnnnnnnnnnnnnnnnnnnnnnnnnnnnnnnnnnnnnnnnnnnnnnnnnnnnnnnnnnnnnnnnnnnnnnnnnnnnnnnnnnnnnnnnnnnnnnnnnnnnnnnnnnnnnnnnnnnnnnnnnnnnnnnnnnnnnnnnnnnnnnnnnnnnnnnnnnnnnnnnnnnnnnnnnnnnnnnnnnnnnnnnnnnnnnnnnnnnnnnnnnnnnnnnnnnnnnnnnnnnnnnnnnnnnnnnnnnnnnnnnnnnnnnnnnnnnnnnnnnnnnnnnnnnnnnnnnnnnnnnnnnnnnnnnnnnnnnnnnnnnnnnnnnnnnnnnnnnnnnnnnnnnnnnnnnnnnnnnnnnnnnnnnnnnnnnnnnnnnnnnnnnnnnnnnnnnnnnnnnnnnnnnnnnnnnnnnnnnnnnnnnnnnnnnnnnnnnnnnnnnnnnnnnnnnnnnnnnnnnnnnnnnnnnnnnnnnnnnnnnnnnnnnnnnnnnnnnnnnnnnnnnnnnnnnnnnnnnnnnnnnnnnnnnnnnnnnnnnnnnnnnnnnnnnnnnnnnnnnnnnnnnnnnnnnnnnnnnnnnnnnnnnnnnnnnnnnnnnnnnnnnnnnnnnnnnnnnnnnnnnnnnnnnnnnnnnnnnnnnnnnnnnnnnnnnnnnnnnnnnnnnnnnnnnnnnnnnnnnnnnnnnnnnnnnnnnnnnnnnnnnnnnnnnnnnnnnnnnnnnnnnnnnnnnnnnnnnnnnnnnnnnnnnnnnnnnnnnnnnnnnnnnnnnnnnnnnnnnnnnnnnnnnnnnnnnnnnnnnnnnnnnnnnnnnnnnnnnnnnnnnnnnnnnnnnnnnnnnnnnnnnnnnnnnnnnnnnnnnnnnnnnnnnnnnnnnnnnnnnnnnnnnnnnnnnnnnnnnnnnnnnnnnnnnnnnnnnnnnnnnnnnnnnnnnnnnnnnnnnnnnnnnnnnnnnnnnnnnnnnnnnnnnnnnnnnnnnnnnnnnnnnnnnnnnnnnnnnnnnnnnnnnnnnnnnnnnnnnnnnnnnnnnnnnnnnnnnnnnnnnnnnnnnnnnnnnnnnnnnnnnnnnnnnnnnnnnnnnnnnnnnnnnnnnnnnnnnnnnnnnnnnnnnnnnnnnnnnnnnnnnnnnnnnnnnnnnnnnnnnnnnnnnnnnnnnnnnnnnnnnnnnnnnnnnnnnnnnnnnnnnnnnnnnnnnnnnnnnnnnnnnnnnnnnnnnnnnnnnnnnnnnnnnnnnnnnnnnnnnnnnnnnnnnnnnnnnnnnnnnnnnnnnnnnnnnnnnnnnnnnnnnnnnnnnnnnnnnnnnnnnnnnnnnnnnnnnnnnnnnnnnnnnnnnnnnnnnnnnnnnnnnnnnnnnnnnnnnnnnnnnnnnnnnnnnnnnnnnnnnnnnnnnnnnnnnnnnnnnnnnnnnnnnnnnnnnnnnnnnnnnnnnnnnnnnnnnnnnnnnnnnnnnnnnnnnnnnnnnnnnnnnnnnnnnnnnnnnnnnnnnnnnnnnnnnnnnnnnnnnnnnnnnnnnnnnnnnnnnnnnnnnnnnnnnnnnnnnnnnnnnnnnnnnnnnnnnnnnnnnnnnnnnnnnnnnnnnnnnnnnnnnnnnnnnnnnnnnnnnnnnnnnnnnnnnnnnnnnnnnnnnnnnnnnnnnnnnnnnnnnnnnnnnnnnnnnnnnnnnnnnnnnnnnnnnnnnnnnnnnnnnnnnnnnnnnnnnnnnnnnnnnnnnnnnnnnnnnnnnnnnnnnnnnnnnnnnnnnnnnnnnnnnnnnnnnnnnnnnnnnnnnnnnnnnnnnnnnnnnnnnnnnnnnnnnnnnnnnnnnnnnnnnnnnnnnnnnnnnnnnnnnnnnnnnnnnnnnnnnnnnnnnnnnnnnnnnnnnnnnnnnnnnnnnnnnnnnnnnnnnnnnnnnnnnnnnnnnnnnnnnnnnnnnnnnnnnnnnnnnnnnnnnnnnnnnnnnnnnnnnnnnnnnnnnnnnnnnnnnnnnnnnnnnnnnnnnnnnnnnnnnnnnnnnnnnnnnnnnnnnnnnnnnnnnnnnnnnnnnnnnnnnnnnnnnnnnnnnnnnnnnnnnnnnnnnnnnnnnnnnnnnnnnnnnnnnnnnnnnnnnnnnnnnnnnnnnnnnnnnnnnnnnnnnnnnnnnnnnnnnnnnnnnnnnnnnnnnnnnnnnnnnnnnnnnnnnnnnnnnnnnnnnnnnnnnnnnnnnnnnnnnnnnnnnnnnnnnnnnnnnnnnnnnnnnnnnnnnnnnnnnnnnnnnnnnnnnnnnnnnnnnnnnnnnnnnnnnnnnnnnnnnnnnnnnnnnnnnnnnnnnnnnnnnnnnnnnnnnnnnnnnnnnnnnnnnnnnnnnnnnnnnnnnnnnnnnnnnnnnnnnnnnnnnnnnnnnnnnnnnnnnnnnnnnnnnnnnnnnnnnnnnnnnnnnnnnnnnnnnnnnnnnnnnnnnnnnnnnnnnnnnnnnnnnnnnnnnnnnnnnnnnnnnnnnnnnnnnnnnnnnnnnnnnnnnnnnnnnnnnnnnnnnnnnnnnnnnnnnnnnnnnnnnnnnnnnnnnnnnnnnnnnnnnnnnnnnnnnnnnnnnnnnnnnnnnnnnnnnnnnnnnnnnnnnnnnnnnnnnnnnnnnnnnnnnnnnnnnnnnnnnnnnnnnnnnnnnnnnnnnnnnnnnnnnnnnnnnnnnnnnnnnnnnnnnnnnnnnnnnnnnnnnnnnnnnnnnnnnnnnnnnnnnnnnnnnnnnnnnnnnnnnnnnnnnnnnnnnnnnnnnnnnnnnnnnnnnnnnnnnnnnnnnnnnnnnnnnnnnnnnnnnnnnnnnnnnnnnnnnnnnnnnnnnnnnnnnnnnnnnnnnnnnnnnnnnnnnnnnnnnnnnnnnnnnnnnnnnnnnnnnnnnnnnnnnnnnnnnnnnnnnnnnnnnnnnnnnnnnnnnnnnnnnnnnnnnnnnnnnnnnnnnnnnnnnnnnnnnnnnnnnnnnnnnnnnnnnnnnnnnnnnnnnnnnnnnnnnnnnnnnnnnnnnnnnnnnnnnnnnnnnnnnnnnnnnnnnnnnnnnnnnnnnnnnnnnnnnnnnnnnnnnnnnnnnnnnnnnnnnnnnnnnnnnnnnnnnnnnnnnnnnnnnnnnnnnnnnnnnnnnnnnnnnnnnnnnnnnnnnnnnnnnnnnnnnnnnnnnnnnnnnnnnnnnnnnnnnnnnnnnnnnnnnnnnnnnnnnnnnnnnnnnnnnnnnnnnnnnnnnnnnnnnnnnnnnnnnnnnnnnnnnnnnnnnnnnnnnnnnnnnnnnnnnnnnnnnnnnnnnnnnnnnnnnnnnnnnnnnnnnnnnnnnnnnnnnnnnnnnnnnnnnnnnnnnnnnnnnnnnnnnnnnnnnnnnnnnnnnnnnnnnnnnnnnnnnnnnnnnnnnnnnnnnnnnnnnnnnnnnnnnnnnnnnnnnnnnnnnnnnnnnnnnnnnnnnnnnnnnnnnnnnnnnnnnnnnnnnnnnnnnnnnnnnnnnnnnnnnnnnnnnnnnnnnnnnnnnnnnnnnnnnnnnnnnnnnnnnnnnnnnnnnnnnnnnnnnnnnnnnnnnnnnnnnnnnnnnnnnnnnnnnnnnnnnnnnnnnnnnnnnnnnnnnnnnnnnnnnnnnnnnnnnnnnnnnnnnnnnnnnnnnnnnnnnnnnnnnnnnnnnnnnnnnnnnnnnnnnnnnnnnnnnnnnnnnnnnnnnnnnnnnnnnnnnnnnnnnnnnnnnnnnnnnnnnnnnnnnnnnnnnnnnnnnnnnnnnnnnnnnnnnnnnnnnnnnnnnnnnnnnnnnnnnnnnnnnnnnnnnnnnnnnnnnnnnnnnnnnnnnnnnnnnnnnnnnnnnnnnnnnnnnnnnnnnnnnnnnnnnnnnnnnnnnnnnnnnnnnnnnnnnnnnnnnnnnnnnnnnnnnnnnnnnnnnnnnnnnnnnnnnnnnnnnnnnnnnnnnnnnnnnnnnnnnnnnnnnnnnnnnnnnnnnnnnnnnnnnnnnnnnnnnnnnnnnnnnnnnnnnnnnnnnnnnnnnnnnnnnnnnnnnnnnnnnnnnnnnnnnnnnnnnnnnnnnnnnnnnnnnnnnnnnnnnnnnnnnnnnnnnnnnnnnnnnnnnnnnnnnnnnnnnnnnnnnnnnnnnnnnnnnnnnnnnnnnnnnnnnnnnnnnnnnnnnnnnnnnnnnnnnnnnnnnnnnnnnnnnnnnnnnnnnnnnnnnnnnnnnnnnnnnnnnnnnnnnnnnnnnnnnnnnnnnnnnnnnnnnnnnnnnnnnnnnnnnnnnnnnnnnnnnnnnnnnnnnnnnnnnnnnnnnnnnnnnnnnnnnnnnnnnnnnnnnnnnnnnnnnnnnnnnnnnnnnnnnnnnnnnnnnnnnnnnnnnnnnnnnnnnnnnnnnnnnnnnnnnnnnnnnnnnnnnnnnnnnnnnnnnnnnnnnnnnnnnnnnnnnnnnnnnnnnnnnnnnnnnnnnnnnnnnnnnnnnnnnnnnnnnnnnnnnnnnnnnnnnnnnnnnnnnnnnnnnnnnnnnnnnnnnnnnnnnnnnnnnnnnnnnnnnnnnnnnnnnnnnnnnnnnnnnnnnnnnnnnnnnnnnnnnnnnnnnnnnnnnnnnnnnnnnnnnnnnnnnnnnnnnnnnnnnnnnnnnnnnnnnnnnnnnnnnnnnnnnnnnnnnnnnnnnnnnnnnnnnnnnnnnnnnnnnnnnnnnnnnnnnnnnnnnnnnnnnnnnnnnnnnnnnnnnnnnnnnnnnnnnnnnnnnnnnnnnnnnnnnnnnnnnnnnnnnnnnnnnnnnnnnnnnnnnnnnnnnnnnnnnnnnnnnnnnnnnnnnnnnnnnnnnnnnnnnnnnnnnnnnnnnnnnnnnnnnnnnnnnnnnnnnnnnnnnnnnnnnnnnnnnnnnnnnnnnnnnnnnnnnnnnnnnnnnnnnnnnnnnnnnnnnnnnnnnnnnnnnnnnnnnnnnnnnnnnnnnnnnnnnnnnnnnnnnnnnnnnnnnnnnnnnnnnnnnnnnnnnnnnnnnnnnnnnnnnnnnnnnnnnnnnnnnnnnnnnnnnnnnnnnnnnnnnnnnnnnnnnnnnnnnnnnnnnnnnnnnnnnnnnnnnnnnnnnnnnnnnnnnnnnnnnnnnnnnnnnnnnnnnnnnnnnnnnnnnnnnnnnnnnnnnnnnnnnnnnnnnnnnnnnnnnnnnnnnnnnnnnnnnnnnnnnnnnnnnnnnnnnnnnnnnnnnnnnnnnnnnnnnnnnnnnnnnnnnnnnnnnnnnnnnnnnnnnnnnnnnnnnnnnnnnnnnnnnnnnnnnnnnnnnnnnnnnnnnnnnnnnnnnnnnnnnnnnnnnnnnnnnnnnnnnnnnnnnnnnnnnnnnnnnnnnnnnnnnnnnnnnnnnnnnnnnnnnnnnnnnnnnnnnnnnnnnnnnnnnnnnnnnnnnnnnnnnnnnnnnnnnnnnnnnnnnnnnnnnnnnnnnnnnnnnnnnnnnnnnnnnnnnnnnnnnnnnnnnnnnnnnnnnnnnnnnnnnnnnnnnnnnnnnnnnnnnnnnnnnnnnnnnnnnnnnnnnnnnnnnnnnnnnnnnnnnnnnnnnnnnnnnnnnnnnnnnnnnnnnnnnnnnnnnnnnnnnnnnnnnnnnnnnnnnnnnnnnnnnnnnnnnnnnnnnnnnnnnnnnnnnnnnnnnnnnnnnnnnnnnnnnnnnnnnnnnnnnnnnnnnnnnnnnnnnnnnnnnnnnnnnnnnnnnnnnnnnnnnnnnnnnnnnnnnnnnnnnnnnnnnnnnnnnnnnnnnnnnnnnnnnnnnnnnnnnnnnnnnnnnnnnnnnnnnnnnnnnnnnnnnnnnnnnnnnnnnnnnnnnnnnnnnnnnnnnnnnnnnnnnnnnnnnnnnnnnnnnnnnnnnnnnnnnnnnnnnnnnnnnnnnnnnnnnnnnnnnnnnnnnnnnnnnnnnnnnnnnnnnnnnnnnnnnnnnnnnnnnnnnnnnnnnnnnnnnnnnnnnnnnnnnnnnnnnnnnnnnnnnnnnnnnnnnnnnnnnnnnnnnnnnnnnnnnnnnnnnnnnnnnnnnnnnnnnnnnnnnnnnnnnnnnnnnnnnnnnnnnnnnnnnnnnnnnnnnnnnnnnnnnnnnnnnnnnnnnnnnnnnnnnnnnnnnnnnnnnnnnnnnnnnnnnnnnnnnnnnnnnnnnnnnnnnnnnnnnnnnnnnnnnnnnnnnnnnnnnnnnnnnnnnnnnnnnnnnnnnnnnnnnnnnnnnnnnnnnnnnnnnnnnnnnnnnnnnnnnnnnnnnnnnnnnnnnnnnnnnnnnnnnnnnnnnnnnnnnnnnnnnnnnnnnnnnnnnnnnnnnnnnnnnnnnnnnnnnnnnnnnnnnnnnnnnnnnnnnnnnnnnnnnnnnnnnnnnnnnnnnnnnnnnnnnnnnnnnnnnnnnnnnnnnnnnnnnnnnnnnnnnnnnnnnnnnnnnnnnnnnnnnnnnnnnnnnnnnnnnnnnnnnnnnnnnnnnnnnnnnnnnnnnnnnnnnnnnnnnnnnnnnnnnnnnnnnnnnnnnnnnnnnnnnnnnnnnnnnnnnnnnnnnnnnnnnnnnnnnnnnnnnnnnnnnnnnnnnnnnnnnnnnnnnnnnnnnnnnnnnnnnnnnnnnnnnnnnnnnnnnnnnnnnnnnnnnnnnnnnnnnnnnnnnnnnnnnnnnnnnnnnnnnnnnnnnnnnnnnnnnnnnnnnnnnnnnnnnnnnnnnnnnnnnnnnnnnnnnnnnnnnnnnnnnnnnnnnnnnnnnnnnnnnnnnnnnnnnnnnnnnnnnnnnnnnnnnnnnnnnnnnnnnnnnnnnnnnnnnnnnnnnnnnnnnnnnnnnnnnnnnnnnnnnnnnnnnnnnnnnnnnnnnnnnnnnnnnnnnnnnnnnnnnnnnnnnnnnnnnnnnnnnnnnnnnnnnnnnnnnnnnnnnnnnnnnnnnnnnnnnnnnnnnnnnnnnnnnnnnnnnnnnnnnnnnnnnnnnnnnnnnnnnnnnnnnnnnnnnnnnnnnnnnnnnnnnnnnnnnnnnnnnnnnnnnnnnnnnnnnnnnnnnnnnnnnnnnnnnnnnnnnnnnnnnnnnnnnnnnnnnnnnnnnnnnnnnnnnnnnnnnnnnnnnnnnnnnnnnnnnnnnnnnnnnnnnnnnnnnnnnnnnnnnnnnnnnnnnnnnnnnnnnnnnnnnnnnnnnnnnnnnnnnnnnnnnnnnnnnnnnnnnnnnnnnnnnnnnnnnnnnnnnnnnnnnnnnnnnnnnnnnnnnnnnnnnnnnnnnnnnnnnnnnnnnnnnnnnnnnnnnnnnnnnnnnnnnnnnnnnnnnnnnnnnnnnnnnnnnnnnnnnnnnnnnnnnnnnnnnnnnnnnnnnnnnnnnnnnnnnnnnnnnnnnnnnnnnnnnnnnnnnnnnnnnnnnnnnnnnnnnnnnnnnnnnnnnnnnnnnnnnnnnnnnnnnnnnnnnnnnnnnnnnnnnnnnnnnnnnnnnnnnnnnnnnnnnnnnnnnnnnnnnnnnnnnnnnnnnnnnnnnnnnnnnnnnnnnnnnnnnnnnnnnnnnnnnnnnnnnnnnnnnnnnnnnnnnnnnnnnnnnnnnnnnnnnnnnnnnnnnnnnnnnnnnnnnnnnnnnnnnnnnnnnnnnnnnnnnnnnnnnnnnnnnnnnnnnnnnnnnnnnnnnnnnnnnnnnnnnnnnnnnnnnnnnnnnnnnnnnnnnnnnnnnnnnnnnnnnnnnnnnnnnnnnnnnnnnnnnnnnnnnnnnnnnnnnnnnnnnnnnnnnnnnnnnnnnnnnnnnnnnnnnnnnnnnnnnnnnnnnnnnnnnnnnnnnnnnnnnnnnnnnnnnnnnnnnnnnnnnnnnnnnnnnnnnnnnnnnnnnnnnnnnnnnnnnnnnnnnnnnnnnnnnnnnnnnnnnnnnnnnnnnnnnnnnnnnnnnnnnnnnnnnnnnnnnnnnnnnnnnnnnnnnnnnnnnnnnnnnnnnnnnnnnnnnnnnnnnnnnnnnnnnnnnnnnnnnnnnnnnnnnnnnnnnnnnnnnnnnnnnnnnnnnnnnnnnnnnnnnnnnnnnnnnnnnnnnnnnnnnnnnnnnnnnnnnnnnnnnnnnnnnnnnnnnnnnnnnnnnnnnnnnnnnnnnnnnnnnnnnnnnnnnnnnnnnnnnnnnnnnnnnnnnnnnnnnnnnnnnnnnnnnnnnnnnnnnnnnnnnnnnnnnnnnnnnnnnnnnnnnnnnnnnnnnnnnnnnnnnnnnnnnnnnnnnnnnnnnnnnnnnnnnnnnnnnnnnnnnnnnnnnnnnnnnnnnnnnnnnnnnnnnnnnnnnnnnnnnnnnnnnnnnnnnnnnnnnnnnnnnnnnnnnnnnnnnnnnnnnnnnnnnnnnnnnnnnnnnnnnnnnnnnnnnnnnnnnnnnnnnnnnnnnnnnnnnnnnnnnnnnnnnnnnnnnnnnnnnnnnnnnnnnnnnnnnnnnnnnnnnnnnnnnnnnnnnnnnnnnnnnnnnnnnnnnnnnnnnnnnnnnnnnnnnnnnnnnnnnnnnnnnnnnnnnnnnnnnnnnnnnnnnnnnnnnnnnnnnnnnnnnnnnnnnnnnnnnnnnnnnnnnnnnnnnnnnnnnnnnnnnnnnnnnnnnnnnnnnnnnnnnnnnnnnnnnnnnnnnnnnnnnnnnnnnnnnnnnnnnnnnnnnnnnnnnnnnnnnnnnnnnnnnnnnnnnnnnnnnnnnnnnnnnnnnnnnnnnnnnnnnnnnnnnnnnnnnnnnnnnnnnnnnnnnnnnnnnnnnnnnnnnnnnnnnnnnnnnnnnnnnnnnnnnnnnnnnnnnnnnnnnnnnnnnnnnnnnnnnnnnnnnnnnnnnnnnnnnnnnnnnnnnnnnnnnnnnnnnnnnnnnnnnnnnnnnnnnnnnnnnnnnnnnnnnnnnnnnnnnnnnnnnnnnnnnnnnnnnnnnnnnnnnnnnnnnnnnnnnnnnnnnnnnnnnnnnnnnnnnnnnnnnnnnnnnnnnnnnnnnnnnnnnnnnnnnnnnnnnnnnnnnnnnnnnnnnnnnnnnnnnnnnnnnnnnnnnnnnnnnnnnnnnnnnnnnnnnnnnnnnnnnnnnnnnnnnnnnnnnnnnnnnnnnnnnnnnnnnnnnnnnnnnnnnnnnnnnnnnnnnnnnnnnnnnnnnnnnnnnnnnnnnnnnnnnnnnnnnnnnnnnnnnnnnnnnnnnnnnnnnnnnnnnnnnnnnnnnnnnnnnnnnnnnnnnnnnnnnnnnnnnnnnnnnnnnnnnnnnnnnnnnnnnnnnnnnnnnnnnnnnnnnnnnnnnnnnnnnnnnnnnnnnnnnnnnnnnnnnnnnnnnnnnnnnnnnnnnnnnnnnnnnnnnnnnnnnnnnnnnnnnnnnnnnnnnnnnnnnnnnnnnnnnnnnnnnnnnnnnnnnnnnnnnnnnnnnnnnnnnnnnnnnnnnnnnnnnnnnnnnnnnnnnnnnnnnnnnnnnnnnnnnnnnnnnnnnnnnnnnnnnnnnnnnnnnnnnnnnnnnnnnnnnnnnnnnnnnnnnnnnnnnnnnnnnnnnnnnnnnnnnnnnnnnnnnnnnnnnnnnnnnnnnnnnnnnnnnnnnnnnnnnnnnnnnnnnnnnnnnnnnnnnnnnnnnnnnnnnnnnnnnnnnnnnnnnnnnnnnnnnnnnnnnnnnnnnnnnnnnnnnnnnnnnnnnnnnnnnnnnnnnnnnnnnnnnnnnnnnnnnnnnnnnnnnnnnnnnnnnnnnnnnnnnnnnnnnnnnnnnnnnnnnnnnnnnnnnnnnnnnnnnnnnnnnnnnnnnnnnnnnnnnnnnnnnnnnnnnnnnnnnnnnnnnnnnnnnnnnnnnnnnnnnnnnnnnnnnnnnnnnnnnnnnnnnnnnnnnnnnnnnnnnnnnnnnnnnnnnnnnnnnnnnnnnnnnnnnnnnnnnnnnnnnnnnnnnnnnnnnnnnnnnnnnnnnnnnnnnnnnnnnnnnnnnnnnnnnnnnnnnnnnnnnnnnnnnnnnnnnnnnnnnnnnnnnnnnnnnnnnnnnnnnnnnnnnnnnnnnnnnnnnnnnnnnnnnnnnnnnnnnnnnnnnnnnnnnnnnnnnnnnnnnnnnnnnnnnnnnnnnnnnnnnnnnnnnnnnnnnnnnnnnnnnnnnnnnnnnnnnnnnnnnnnnnnnnnnnnnnnnnnnnnnnnnnnnnnnnnnnnnnnnnnnnnnnnnnnnnnnnnnnnnnnnnnnnnnnnnnnnnnnnnnnnnnnnnnnnnnnnnnnnnnnnnnnnnnnnnnnnnnnnnnnnnnnnnnnnnnnnnnnnnnnnnnnnnnnnnnnnnnnnnnnnnnnnnnnnnnnnnnnnnnnnnnnnnnnnnnnnnnnnnnnnnnnnnnnnnnnnnnnnnnnnnnnnnnnnnnnnnnnnnnnnnnnnnnnnnnnnnnnnnnnnnnnnnnnnnnnnnnnnnnnnnnnnnnnnnnnnnnnnnnnnnnnnnnnnnnnnnnnnnnnnnnnnnnnnnnnnnnnnnnnnnnnnnnnnnnnnnnnnnnnnnnnnnnnnnnnnnnnnnnnnnnnnnnnnnnnnnnnnnnnnnnnnnnnnnnnnnnnnnnnnnnnnnnnnnnnnnnnnnnnnnnnnnnnnnnnnnnnnnnnnnnnnnnnnnnnnnnnnnnnnnnnnnnnnnnnnnnnnnnnnnnnnnnnnnnnnnnnnnnnnnnnnnnnnnnnnnnnnnnnnnnnnnnnnnnnnnnnnnnnnnnnnnnnnnnnnnnnnnnnnnnnnnnnnnnnnnnnnnnnnnnnnnnnnnnnnnnnnnnnnnnnnnnnnnnnnnnnnnnnnnnnnnnnnnnnnnnnnnnnnnnnnnnnnnnnnnnnnnnnnnnnnnnnnnnnnnnnnnnnnnnnnnnnnnnnnnnnnnnnnnnnnnnnnnnnnnnnnnnnnnnnnnnnnnnnnnnnnnnnnnnnnnnnnnnnnnnnnnnnnnnnnnnnnnnnnnnnnnnnnnnnnnnnnnnnnnnnnnnnnnnnnnnnnnnnnnnnnnnnnnnnnnnnnnnnnnnnnnnnnnnnnnnnnnnnnnnnnnnnnnnnnnnnnnnnnnnnnnnnnnnnnnnnnnnnnnnnnnnnnnnnnnnnnnnnnnnnnnnnnnnnnnnnnnnnnnnnnnnnnnnnnnnnnnnnnnnnnnnnnnnnnnnnnnnnnnnnnnnnnnnnnnnnnnnnnnnnnnnnnnnnnnnnnnnnnnnnnnnnnnnnnnnnnnnnnnnnnnnnnnnnnnnnnnnnnnnnnnnnnnnnnnnnnnnnnnnnnnnnnnnnnnnnnnnnnnnnnnnnnnnnnnnnnnnnnnnnnnnnnnnnnnnnnnnnnnnnnnnnnnnnnnnnnnnnnnnnnnnnnnnnnnnnnnnnnnnnnnnnnnnnnnnnnnnnnnnnnnnnnnnnnnnnnnnnnnnnnnnnnnnnnnnnnnnnnnnnnnnnnnnnnnnnnnnnnnnnnnnnnnnnnnnnnnnnnnnnnnnnnnnnnnnnnnnnnnnnnnnnnnnnnnnnnnnnnnnnnnnnnnnnnnnnnnnnnnnnnnnnnnnnnnnnnnnnnnnnnnnnnnnnnnnnnnnnnnnnnnnnnnnnnnnnnnnnnnnnnnnnnnnnnnnnnnnnnnnnnnnnnnnnnnnnnnnnnnnnnnnnnnnnnnnnnnnnnnnnnnnnnnnnnnnnnnnnnnnnnnnnnnnnnnnnnnnnnnnnnnnnnnnnnnnnnnnnnnnnnnnnnnnnnnnnnnnnnnnnnnnnnnnnnnnnnnnnnnnnnnnnnnnnnnnnnnnnnnnnnnnnnnnnnnnnnnnnnnnnnnnnnnnnnnnnnnnnnnnnnnnnnnnnnnnnnnnnnnnnnnnnnnnnnnnnnnnnnnnnnnnnnnnnnnnnnnnnnnnnnnnnnnnnnnnnnnnnnnnnnnnnnnnnnnnnnnnnnnnnnnnnnnnnnnnnnnnnnnnnnnnnnnnnnnnnnnnnnnnnnnnnnnnnnnnnnnnnnnnnnnnnnnnnnnnnnnnnnnnnnnnnnnnnnnnnnnnnnnnnnnnnnnnnnnnnnnnnnnnnnnnnnnnnnnnnnnnnnnnnnnnnnnnnnnnnnnnnnnnnnnnnnnnnnnnnnnnnnnnnnnnnnnnnnnnnnnnnnnnnnnnnnnnnnnnnnnnnnnnnnnnnnnnnnnnnnnnnnnnnnnnnnnnnnnnnnnnnnnnnnnnnnnnnnnnnnnnnnnnnnnnnnnnnnnnnnnnnnnnnnnnnnnnnnnnnnnnnnnnnnnnnnnnnnnnnnnnnnnnnnnnnnnnnnnnnnnnnnnnnnnnnnnnnnnnnnnnnnnnnnnnnnnnnnnnnnnnnnnnnnnnnnnnnnnnnnnnnnnnnnnnnnnnnnnnnnnnnnnnnnnnnnnnnnnnnnnnnnnnnnnnnnnnnnnnnnnnnnnnnnnnnnnnnnnnnnnnnnnnnnnnnnnnnnnnnnnnnnnnnnnnnnnnnnnnnnnnnnnnnnnnnnnnnnnnnnnnnnnnnnnnnnnnnnnnnnnnnnnnnnnnnnnnnnnnnnnnnnnnnnnnnnnnnnnnnnnnnnnnnnnnnnnnnnnnnnnnnnnnnnnnnnnnnnnnnnnnnnnnnnnnnnnnnnnnnnnnnnnnnnnnnnnnnnnnnnnnnnnnnnnnnnnnnnnnnnnnnnnnnnnnnnnnnnnnnnnnnnnnnnnnnnnnnnnnnnnnnnnnnnnnnnnnnnnnnnnnnnnnnnnnnnnnnnnnnnnnnnnnnnnnnnnnnnnnnnnnnnnnnnnnnnnnnnnnnnnnnnnnnnnnnnnnnnnnnnnnnnnnnnnnnnnnnnnnnnnnnnnnnnnnnnnnnnnnnnnnnnnnnnnnnnnnnnnnnnnnnnnnnnnnnnnnnnnnnnnnnnnnnnnnnnnnnnnnnnnnnnnnnnnnnnnnnnnnnnnnnnnnnnnnnnnnnnnnnnnnnnnnnnnnnnnnnnnnnnnnnnnnnnnnnnnnnnnnnnnnnnnnnnnnnnnnnnnnnnnnnnnnnnnnnnnnnnnnnnnnnnnnnnnnnnnnnnnnnnnnnnnnnnnnnnnnnnnnnnnnnnnnnnnnnnnnnnnnnnnnnnnnnnnnnnnnnnnnnnnnnnnnnnnnnnnnnnnnnnnnnnnnnnnnnnnnnnnnnnnnnnnnnnnnnnnnnnnnnnnnnnnnnnnnnnnnnnnnnnnnnnnnnnnnnnnnnnnnnnnnnnnnnnnnnnnnnnnnnnnnnnnnnnnnnnnnnnnnnnnnnnnnnnnnnnnnnnnnnnnnnnnnnnnnnnnnnnnnnnnnnnnnnnnnnnnnnnnnnnnnnnnnnnnnnnnnnnnnnnnnnnnnnnnnnnnnnnnnnnnnnnnnnnnnnnnnnnnnnnnnnnnnnnnnnnnnnnnnnnnnnnnnnnnnnnnnnnnnnnnnnnnnnnnnnnnnnnnnnnnnnnnnnnnnnnnnnnnnnnnnnnnnnnnnnnnnnnnnnnnnnnnnnnnnnnnnnnnnnnnnnnnnnnnnnnnnnnnnnnnnnnnnnnnnnnnnnnnnnnnnnnnnnnnnnnnnnnnnnnnnnnnnnnnnnnnnnnnnnnnnnnnnnnnnnnnnnnnnnnnnnnnnnnnnnnnnnnnnnnnnnnnnnnnnnnnnnnnnnnnnnnnnnnnnnnnnnnnnnnnnnnnnnnnnnnnnnnnnnnnnnnnnnnnnnnnnnnnnnnnnnnnnnnnnnnnnnnnnnnnnnnnnnnnnnnnnnnnnnnnnnnnnnnnnnnnnnnnnnnnnnnnnnnnnnnnnnnnnnnnnnnnnnnnnnnnnnnnnnnnnnnnnnnnnnnnnnnnnnnnnnnnnnnnnnnnnnnnnnnnnnnnnnnnnnnnnnnnnnnnnnnnnnnnnnnnnnnnnnnnnnnnnnnnnnnnnnnnnnnnnnnnnnnnnnnnnnnnnnnnnnnnnnnnnnnnnnnnnnnnnnnnnnnnnnnnnnnnnnnnnnnnnnnnnnnnnnnnnnnnnnnnnnnnnnnnnnnnnnnnnnnnnnnnnnnnnnnnnnnnnnnnnnnnnnnnnnnnnnnnnnnnnnnnnnnnnnnnnnnnnnnnnnnnnnnnnnnnnnnnnnnnnnnnnnnnnnnnnnnnnnnnnnnnnnnnnnnnnnnnnnnnnnnnnnnnnnnnnnnnnnnnnnnnnnnnnnnnnnnnnnnnnnnnnnnnnnnnnnnnnnnnnnnnnnnnnnnnnnnnnnnnnnnnnnnnnnnnnnnnnnnnnnnnnnnnnnnnnnnnnnnnnnnnnnnnnnnnnnnnnnnnnnnnnnnnnnnnnnnnnnnnnnnnnnnnnnnnnnnnnnnnnnnnnnnnnnnnnnnnnnnnnnnnnnnnnnnnnnnnnnnnnnnnnnnnnnnnnnnnnnnnnnnnnnnnnnnnnnnnnnnnnnnnnnnnnnnnnnnnnnnnnnnnnnnnnnnnnnnnnnnnnnnnnnnnnnnnnnnnnnnnnnnnnnnnnnnnnnnnnnnnnnnnnnnnnnnnnnnnnnnnnnnnnnnnnnnnnnnnnnnnnnnnnnnnnnnnnnnnnnnnnnnnnnnnnnnnnnnnnnnnnnnnnnnnnnnnnnnnnnnnnnnnnnnnnnnnnnnnnnnnnnnnnnnnnnnnnnnnnnnnnnnnnnnnnnnnnnnnnnnnnnnnnnnnnnnnnnnnnnnnnnnnnnnnnnnnnnnnnnnnnnnnnnnnnnnnnnnnnnnnnnnnnnnnnnnnnnnnnnnnnnnnnnnnnnnnnnnnnnnnnnnnnnnnnnnnnnnnnnnnnnnnnnnnnnnnnnnnnnnnnnnnnnnnnnnnnnnnnnnnnnnnnnnnnnnnnnnnnnnnnnnnnnnnnnnnnnnnnnnnnnnnnnnnnnnnnnnnnnnnnnnnnnnnnnnnnnnnnnnnnnnnnnnnnnnnnnnnnnnnnnnnnnnnnnnnnnnnnnnnnnnnnnnnnnnnnnnnnnnnnnnnnnnnnnnnnnnnnnnnnnnnnnnnnnnnnnnnnnnnnnnnnnnnnnnnnnnnnnnnnnnnnnnnnnnnnnnnnnnnnnnnnnnnnnnnnnnnnnnnnnnnnnnnnnnnnnnnnnnnnnnnnnnnnnnnnnnnnnnnnnnnnnnnnnnnnnnnnnnnnnnnnnnnnnnnnnnnnnnnnnnnnnnnnnnnnnnnnnnnnnnnnnnnnnnnnnnnnnnnnnnnnnnnnnnnnnnnnnnnnnnnnnnnnnnnnnnnnnnnnnnnnnnnnnnnnnnnnnnnnnnnnnnnnnnnnnnnnnnnnnnnnnnnnnnnnnnnnnnnnnnnnnnnnnnnnnnnnnnnnnnnnnnnnnnnnnnnnnnnnnnnnnnnnnnnnnnnnnnnnnnnnnnnnnnnnnnnnnnnnnnnnnnnnnnnnnnnnnnnnnnnnnnnnnnnnnnnnnnnnnnnnnnnnnnnnnnnnnnnnnnnnnnnnnnnnnnnnnnnnnnnnnnnnnnnnnnnnnnnnnnnnnnnnnnnnnnnnnnnnnnnnnnnnnnnnnnnnnnnnnnnnnnnnnnnnnnnnnnnnnnnnnnnnnnnnnnnnnnnnnnnnnnnnnnnnnnnnnnnnnnnnnnnnnnnnnnnnnnnnnnnnnnnnnnnnnnnnnnnnnnnnnnnnnnnnnnnnnnnnnnnnnnnnnnnnnnnnnnnnnnnnnnnnnnnnnnnnnnnnnnnnnnnnnnnnnnnnnnnnnnnnnnnnnnnnnnnnnnnnnnnnnnnnnnnnnnnnnnnnnnnnnnnnnnnnnnnnnnnnnnnnnnnnnnnnnnnnnnnnnnnnnnnnnnnnnnnnnnnnnnnnnnnnnnnnnnnnnnnnnnnnnnnnnnnnnnnnnnnnnnnnnnnnnnnnnnnnnnnnnnnnnnnnnnnnnnnnnnnnnnnnnnnnnnnnnnnnnnnnnnnnnnnnnnnnnnnnnnnnnnnnnnnnnnnnnnnnnnnnnnnnnnnnnnnnnnnnnnnnnnnnnnnnnnnnnnnnnnnnnnnnnnnnnnnnnnnnnnnnnnnnnnnnnnnnnnnnnnnnnnnnnnnnnnnnnnnnnnnnnnnnnnnnnnnnnnnnnnnnnnnnnnnnnnnnnnnnnnnnnnnnnnnnnnnnnnnnnnnnnnnnnnnnnnnnnnnnnnnnnnnnnnnnnnnnnnnnnnnnnnnnnnnnnnnnnnnnnnnnnnnnnnnnnnnnnnnnnnnnnnnnnnnnnnnnnnnnnnnnnnnnnnnnnnnnnnnnnnnnnnnnnnnnnnnnnnnnnnnnnnnnnnnnnnnnnnnnnnnnnnnnnnnnnnnnnnnnnnnnnnnnnnnnnnnnnnnnnnnnnnnnnnnnnnnnnnnnnnnnnnnnnnnnnnnnnnnnnnnnnnnnnnnnnnnnnnnnnnnnnnnnnnnnnnnnnnnnnnnnnnnnnnnnnnnnnnnnnnnnnnnnnnnnnnnnnnnnnnnnnnnnnnnnnnnnnnnnnnnnnnnnnnnnnnnnnnnnnnnnnnnnnnnnnnnnnnnnnnnnnnnnnnnnnnnnnnnnnnnnnnnnnnnnnnnnnnnnnnnnnnnnnnnnnnnnnnnnnnnnnnnnnnnnnnnnnnnnnnnnnnnnnnnnnnnnnnnnnnnnnnnnnnnnnnnnnnnnnnnnnnnnnnnnnnnnnnnnnnnnnnnnnnnnnnnnnnnnnnnnnnnnnnnnnnnnnnnnnnnnnnnnnnnnnnnnnnnnnnnnnnnnnnnnnnnnnnnnnnnnnnnnnnnnnnnnnnnnnnnnnnnnnnnnnnnnnnnnnnnnnnnnnnnnnnnnnnnnnnnnnnnnnnnnnnnnnnnnnnnnnnnnnnnnnnnnnnnnnnnnnnnnnnnnnnnnnnnnnnnnnnnnnnnnnnnnnnnnnnnnnnnnnnnnnnnnnnnnnnnnnnnnnnnnnnnnnnnnnnnnnnnnnnnnnnnnnnnnnnnnnnnnnnnnnnnnnnnnnnnnnnnnnnnnnnnnnnnnnnnnnnnnnnnnnnnnnnnnnnnnnnnnnnnnnnnnnnnnnnnnnnnnnnnnnnnnnnnnnnnnnnnnnnnnnnnnnnnnnnnnnnnnnnnnnnnnnnnnnnnnnnnnnnnnnnnnnnnnnnnnnnnnnnnnnnnnnnnnnnnnnnnnnnnnnnnnnnnnnnnnnnnnnnnnnnnnnnnnnnnnnnnnnnnnnnnnnnnnnnnnnnnnnnnnnnnnnnnnnnnnnnnnnnnnnnnnnnnnnnnnnnnnnnnnnnnnnnnnnnnnnnnnnnnnnnnnnnnnnnnnnnnnnnnnnnnnnnnnnnnnnnnnnnnnnnnnnnnnnnnnnnnnnnnnnnnnnnnnnnnnnnnnnnnnnnnnnnnnnnnnnnnnnnnnnnnnnnnnnnnnnnnnnnnnnnnnnnnnnnnnnnnnnnnnnnnnnnnnnnnnnnnnnnnnnnnnnnnnnnnnnnnnnnnnnnnnnnnnnnnnnnnnnnnnnnnnnnnnnnnnnnnnnnnnnnnnnnnnnnnnnnnnnnnnnnnnnnnnnnnnnnnnnnnnnnnnnnnnnnnnnnnnnnnnnnnnnnnnnnnnnnnnnnnnnnnnnnnnnnnnnnnnnnnnnnnnnnnnnnnnnnnnnnnnnnnnnnnnnnnnnnnnnnnnnnnnnnnnnnnnnnnnnnnnnnnnnnnnnnnnnnnnnnnnnnnnnnnnnnnnnnnnnnnnnnnnnnnnnnnnnnnnnnnnnnnnnnnnnnnnnnnnnnnnnnnnnnnnnnnnnnnnnnnnnnnnnnnnnnnnnnnnnnnnnnnnnnnnnnnnnnnnnnnnnnnnnnnnnnnnnnnnnnnnnnnnnnnnnnnnnnnnnnnnnnnnnnnnnnnnnnnnnnnnnnnnnnnnnnnnnnnnnnnnnnnnnnnnnnnnnnnnnnnnnnnnnnnnnnnnnnnnnnnnnnnnnnnnnnnnnnnnnnnnnnnnnnnnnnnnnnnnnnnnnnnnnnnnnnnnnnnnnnnnnnnnnnnnnnnnnnnnnnnnnnnnnnnnnnnnnnnnnnnnnnnnnnnnnnnnnnnnnnnnnnnnnnnnnnnnnnnnnnnnnnnnnnnnnnnnnnnnnnnnnnnnnnnnnnnnnnnnnnnnnnnnnnnnnnnnnnnnnnnnnnnnnnnnnnnnnnnnnnnnnnnnnnnnnnnnnnnnnnnnnnnnnnnnnnnnnnnnnnnnnnnnnnnnnnnnnnnnnnnnnnnnnnnnnnnnnnnnnnnnnnnnnnnnnnnnnnnnnnnnnnnnnnnnnnnnnnnnnnnnnnnnnnnnnnnnnnnnnnnnnnnnnnnnnnnnnnnnnnnnnnnnnnnnnnnnnnnnnnnnnnnnnnnnnnnnnnnnnnnnnnnnnnnnnnnnnnnnnnnnnnnnnnnnnnnnnnnnnnnnnnnnnnnnnnnnnnnnnnnnnnnnnnnnnnnnnnnnnnnnnnnnnnnnnnnnnnnnnnnnnnnnnnnnnnnnnnnnnnnnnnnnnnnnnnnnnnnnnnnnnnnnnnnnnnnnnnnnnnnnnnnnnnnnnnnnnnnnnnnnnnnnnnnnnnnnnnnnnnnnnnnnnnnnnnnnnnnnnnnnnnnnnnnnnnnnnnnnnnnnnnnnnnnnnnnnnnnnnnnnnnnnnnnnnnnnnnnnnnnnnnnnnnnnnnnnnnnnnnnnnnnnnnnnnnnnnnnnnnnnnnnnnnnnnnnnnnnnnnnnnnnnnnnnnnnnnnnnnnnnnnnnnnnnnnnnnnnnnnnnnnnnnnnnnnnnnnnnnnnnnnnnnnnnnnnnnnnnnnnnnnnnnnnnnnnnnnnnnnnnnnnnnnnnnnnnnnnnnnnnnnnnnnnnnnnnnnnnnnnnnnnnnnnnnnnnnnnnnnnnnnnnnnnnnnnnnnnnnnnnnnnnnnnnnnnnnnnnnnnnnnnnnnnnnnnnnnnnnnnnnnnnnnnnnnnnnnnnnnnnnnnnnnnnnnnnnnnnnnnnnnnnnnnnnnnnnnnnnnnnnnnnnnnnnnnnnnnnnnnnnnnnnnnnnnnnnnnnnnnnnnnnnnnnnnnnnnnnnnnnnnnnnnnnnnnnnnnnnnnnnnnnnnnnnnnnnnnnnnnnnnnnnnnnnnnnnnnnnnnnnnnnnnnnnnnnnnnnnnnnnnnnnnnnnnnnnnnnnnnnnnnnnnnnnnnnnnnnnnnnnnnnnnnnnnnnnnnnnnnnnnnnnnnnnnnnnnnnnnnnnnnnnnnnnnnnnnnnnnnnnnnnnnnnnnnnnnnnnnnnnnnnnnnnnnnnnnnnnnnnnnnnnnnnnnnnnnnnnnnnnnnnnnnnnnnnnnnnnnnnnnnnnnnnnnnnnnnnnnnnnnnnnnnnnnnnnnnnnnnnnnnnnnnnnnnnnnnnnnnnnnnnnnnnnnnnnnnnnnnnnnnnnnnnnnnnnnnnnnnnnnnnnnnnnnnnnnnnnnnnnnnnnnnnnnnnnnnnnnnnnnnnnnnnnnnnnnnnnnnnnnnnnnnnnnnnnnnnnnnnnnnnnnnnnnnnnnnnnnnnnnnnnnnnnnnnnnnnnnnnnnnnnnnnnnnnnnnnnnnnnnnnnnnnnnnnnnnnnnnnnnnnnnnnnnnnnnnnnnnnnnnnnnnnnnnnnnnnnnnnnnnnnnnnnnnnnnnnnnnnnnnnnnnnnnnnnnnnnnnnnnnnnnnnnnnnnnnnnnnnnnnnnnnnnnnnnnnnnnnnnnnnnnnnnnnnnnnnnnnnnnnnnnnnnnnnnnnnnnnnnnnnnnnnnnnnnnnnnnnnnnnnnnnnnnnnnnnnnnnnnnnnnnnnnnnnnnnnnnnnnnnnnnnnnnnnnnnnnnnnnnnnnnnnnnnnnnnnnnnnnnnnnnnnnnnnnnnnnnnnnnnnnnnnnnnnnnnnnnnnnnnnnnnnnnnnnnnnnnnnnnnnnnnnnnnnnnnnnnnnnnnnnnnnnnnnnnnnnnnnnnnnnnnnnnnnnnnnnnnnnnnnnnnnnnnnnnnnnnnnnnnnnnnnnnnnnnnnnnnnnnnnnnnnnnnnnnnnnnnnnnnnnnnnnnnnnnnnnnnnnnnnnnnnnnnnnnnnnnnnnnnnnnnnnnnnnnnnnnnnnnnnnnnnnnnnnnnnnnnnnnnnnnnnnnnnnnnnnnnnnnnnnnnnnnnnnnnnnnnnnnnnnnnnnnnnnnnnnnnnnnnnnnnnnnnnnnnnnnnnnnnnnnnnnnnnnnnnnnnnnnnnnnnnnnnnnnnnnnnnnnnnnnnnnnnnnnnnnnnnnnnnnnnnnnnnnnnnnnnnnnnnnnnnnnnnnnnnnnnnnnnnnnnnnnnnnnnnnnnnnnnnnnnnnnnnnnnnnnnnnnnnnnnnnnnnnnnnnnnnnnnnnnnnnnnnnnnnnnnnnnnnnnnnnnnnnnnnnnnnnnnnnnnnnnnnnnnnnnnnnnnnnnnnnnnnnnnnnnnnnnnnnnnnnnnnnnnnnnnnnnnnnnnnnnnnnnnnnnnnnnnnnnnnnnnnnnnnnnnnnnnnnnnnnnnnnnnnnnnnnnnnnnnnnnnnnnnnnnnnnnnnnnnnnnnnnnnnnnnnnnnnnnnnnnnnnnnnnnnnnnnnnnnnnnnnnnnnnnnnnnnnnnnnnnnnnnnnnnnnnnnnnnnnnnnnnnnnnnnnnnnnnnnnnnnnnnnnnnnnnnnnnnnnnnnnnnnnnnnnnnnnnnnnnnnnnnnnnnnnnnnnnnnnnnnnnnnnnnnnnnnnnnnnnnnnnnnnnnnnnnnnnnnnnnnnnnnnnnnnnnnnnnnnnnnnnnnnnnnnnnnnnnnnnnnnnnnnnnnnnnnnnnnnnnnnnnnnnnnnnnnnnnnnnnnnnnnnnnnnnnnnnnnnnnnnnnnnnnnnnnnnnnnnnnnnnnnnnnnnnnnnnnnnnnnnnnnnnnnnnnnnnnnnnnnnnnnnnnnnnnnnnnnnnnnnnnnnnnnnnnnnnnnnnnnnnnnnnnnnnnnnnnnnnnnnnnnnnnnnnnnnnnnnnnnnnnnnnnnnnnnnnnnnnnnnnnnnnnnnnnnnnnnnnnnnnnnnnnnnnnnnnnnnnnnnnnnnnnnnnnnnnnnnnnnnnnnnnnnnnnnnnnnnnnnnnnnnnnnnnnnnnnnnnnnnnnnnnnnnnnnnnnnnnnnnnnnnnnnnnnnnnnnnnnnnnnnnnnnnnnnnnnnnnnnnnnnnnnnnnnnnnnnnnnnnnnnnnnnnnnnnnnnnnnnnnnnnnnnnnnnnnnnnnnnnnnnnnnnnnnnnnnnnnnnnnnnnnnnnnnnnnnnnnnnnnnnnnnnnnnnnnnnnnnnnnnnnnnnnnnnnnnnnnnnnnnnnnnnnnnnnnnnnnnnnnnnnnnnnnnnnnnnnnnnnnnnnnnnnnnnnnnnnnnnnnnnnnnnnnnnnnnnnnnnnnnnnnnnnnnnnnnnnnnnnnnnnnnnnnnnnnnnnnnnnnnnnnnnnnnnnnnnnnnnnnnnnnnnnnnnnnnnnnnnnnnnnnnnnnnnnnnnnnnnnnnnnnnnnnnnnnnnnnnnnnnnnnnnnnnnnnnnnnnnnnnnnnnnnnnnnnnnnnnnnnnnnnnnnnnnnnnnnnnnnnnnnnnnnnnnnnnnnnnnnnnnnnnnnnnnnnnnnnnnnnnnnnnnnnnnnnnnnnnnnnnnnnnnnnnnnnnnnnnnnnnnnnnnnnnnnnnnnnnnnnnnnnnnnnnnnnnnnnnnnnnnnnnnnnnnnnnnnnnnnnnnnnnnnnnnnnnnnnnnnnnnnnnnnnnnnnnnnnnnnnnnnnnnnnnnnnnnnnnnnnnnnnnnnnnnnnnnnnnnnnnnnnnnnnnnnnnnnnnnnnnnnnnnnnnnnnnnnnnnnnnnnnnnnnnnnnnnnnnnnnnnnnnnnnnnnnnnnnnnnnnnnnnnnnnnnnnnnnnnnnnnnnnnnnnnnnnnnnnnnnnnnnnnnnnnnnnnnnnnnnnnnnnnnnnnnnnnnnnnnnnnnnnnnnnnnnnnnnnnnnnnnnnnnnnnnnnnnnnnnnnnnnnnnnnnnnnnnnnnnnnnnnnnnnnnnnnnnnnnnnnnnnnnnnnnnnnnnnnnnnnnnnnnnnnnnnnnnnnnnnnnnnnnnnnnnnnnnnnnnnnnnnnnnnnnnnnnnnnnnnnnnnnnnnnnnnnnnnnnnnnnnnnnnnnnnnnnnnnnnnnnnnnnnnnnnnnnnnnnnnnnnnnnnnnnnnnnnnnnnnnnnnnnnnnnnnnnnnnnnnnnnnnnnnnnnnnnnnnnnnnnnnnnnnnnnnnnnnnnnnnnnnnnnnnnnnnnnnnnnnnnnnnnnnnnnnnnnnnnnnnnnnnnnnnnnnnnnnnnnnnnnnnnnnnnnnnnnnnnnnnnnnnnnnnnnnnnnnnnnnnnnnnnnnnnnnnnnnnnnnnnnnnnnnnnnnnnnnnnnnnnnnnnnnnnnnnnnnnnnnnnnnnnnnnnnnnnnnnnnnnnnnnnnnnnnnnnnnnnnnnnnnnnnnnnnnnnnnnnnnnnnnnnnnnnnnnnnnnnnnnnnnnnnnnnnnnnnnnnnnnnnnnnnnnnnnnnnnnnnnnnnnnnnnnnnnnnnnnnnnnnnnnnnnnnnnnnnnnnnnnnnnnnnnnnnnnnnnnnnnnnnnnnnnnnnnnnnnnnnnnnnnnnnnnnnnnnnnnnnnnnnnnnnnnnnnnnnnnnnnnnnnnnnnnnnnnnnnnnnnnnnnnnnnnnnnnnnnnnnnnnnnnnnnnnnnnnnnnnnnnnnnnnnnnnnnnnnnnnnnnnnnnnnnnnnnnnnnnnnnnnnnnnnnnnnnnnnnnnnnnnnnnnnnnnnnnnnnnnnnnnnnnnnnnnnnnnnnnnnnnnnnnnnnnnnnnnnnnnnnnnnnnnnnnnnnnnnnnnnnnnnnnnnnnnnnnnnnnnnnnnnnnnnnnnnnnnnnnnnnnnnnnnnnnnnnnnnnnnnnnnnnnnnnnnnnnnnnnnnnnnnnnnnnnnnnnnnnnnnnnnnnnnnnnnnnnnnnnnnnnnnnnnnnnnnnnnnnnnnnnnnnnnnnnnnnnnnnnnnnnnnnnnnnnnnnnnnnnnnnnnnnnnnnnnnnnnnnnnnnnnnnnnnnnnnnnnnnnnnnnnnnnnnnnnnnnnnnnnnnnnnnnnnnnnnnnnnnnnnnnnnnnnnnnnnnnnnnnnnnnnnnnnnnnnnnnnnnnnnnnnnnnnnnnnnnnnnnnnnnnnnnnnnnnnnnnnnnnnnnnnnnnnnnnnnnnnnnnnnnnnnnnnnnnnnnnnnnnnnnnnnnnnnnnnnnnnnnnnnnnnnnnnnnnnnnnnnnnnnnnnnnnnnnnnnnnnnnnnnnnnnnnnnnnnnnnnnnnnnnnnnnnnnnnnnnnnnnnnnnnnnnnnnnnnnnnnnnnnnnnnnnnnnnnnnnnnnnnnnnnnnnnnnnnnnnnnnnnnnnnnnnnnnnnnnnnnnnnnnnnnnnnnnnnnnnnnnnnnnnnnnnnnnnnnnnnnnnnnnnnnnnnnnnnnnnnnnnnnnnnnnnnnnnnnnnnnnnnnnnnnnnnnnnnnnnnnnnnnnnnnnnnnnnnnnnnnnnnnnnnnnnnnnnnnnnnnnnnnnnnnnnnnnnnnnnnnnnnnnnnnnnnnnnnnnnnnnnnnnnnnnnnnnnnnnnnnnnnnnnnnnnnnnnnnnnnnnnnnnnnnnnnnnnnnnnnnnnnnnnnnnnnnnnnnnnnnnnnnnnnnnnnnnnnnnnnnnnnnnnnnnnnnnnnnnnnnnnnnnnnnnnnnnnnnnnnnnnnnnnnnnnnnnnnnnnnnnnnnnnnnnnnnnnnnnnnnnnnnnnnnnnnnnnnnnnnnnnnnnnnnnnnnnnnnnnnnnnnnnnnnnnnnnnnnnnnnnnnnnnnnnnnnnnnnnnnnnnnnnnnnnnnnnnnnnnnnnnnnnnnnnnnnnnnnnnnnnnnnnnnnnnnnnnnnnnnnnnnnnnnnnnnnnnnnnnnnnnnnnnnnnnnnnnnnnnnnnnnnnnnnnnnnnnnnnnnnnnnnnnnnnnnnnnnnnnnnnnnnnnnnnnnnnnnnnnnnnnnnnnnnnnnnnnnnnnnnnnnnnnnnnnnnnnnnnnnnnnnnnnnnnnnnnnnnnnnnnnnnnnnnnnnnnnnnnnnnnnnnnnnnnnnnnnnnnnnnnnnnnnnnnnnnnnnnnnnnnnnnnnnnnnnnnnnnnnnnnnnnnnnnnnnnnnnnnnnnnnnnnnnnnnnnnnnnnnnnnnnnnnnnnnnnnnnnnnnnnnnnnnnnnnnnnnnnnnnnnnnnnnnnnnnnnnnnnnnnnnnnnnnnnnnnnnnnnnnnnnnnnnnnnnnnnnnnnnnnnnnnnnnnnnnnnnnnnnnnnnnnnnnnnnnnnnnnnnnnnnnnnnnnnnnnnnnnnnnnnnnnnnnnnnnnnnnnnnnnnnnnnnnnnnnnnnnnnnnnnnnnnnnnnnnnnnnnnnnnnnnnnnnnnnnnnnnnnnnnnnnnnnnnnnnnnnnnnnnnnnnnnnnnnnnnnnnnnnnnnnnnnnnnnnnnnnnnnnnnnnnnnnnnnnnnnnnnnnnnnnnnnnnnnnnnnnnnnnnnnnnnnnnnnnnnnnnnnnnnnnnnnnnnnnnnnnnnnnnnnnnnnnnnnnnnnnnnnnnnnnnnnnnnnnnnnnnnnnnnnnnnnnnnnnnnnnnnnnnnnnnnnnnnnnnnnnnnnnnnnnnnnnnnnnnnnnnnnnnnnnnnnnnnnnnnnnnnnnnnnnnnnnnnnnnnnnnnnnnnnnnnnnnnnnnnnnnnnnnnnnnnnnnnnnnnnnnnnnnnnnnnnnnnnnnnnnnnnnnnnnnnnnnnnnnnnnnnnnnnnnnnnnnnnnnnnnnnnnnnnnnnnnnnnnnnnnnnnnnnnnnnnnnnnnnnnnnnnnnnnnnnnnnnnnnnnnnnnnnnnnnnnnnnnnnnnnnnnnnnnnnnnnnnnnnnnnnnnnnnnnnnnnnnnnnnnnnnnnnnnnnnnnnnnnnnnnnnnnnnnnnnnnnnnnnnnnnnnnnnnnnnnnnnnnnnnnnnnnnnnnnnnnnnnnnnnnnnnnnnnnnnnnnnnnnnnnnnnnnnnnnnnnnnnnnnnnnnnnnnnnnnnnnnnnnnnnnnnnnnnnnnnnnnnnnnnnnnnnnnnnnnnnnnnnnnnnnnnnnnnnnnnnnnnnnnnnnnnnnnnnnnnnnnnnnnnnnnnnnnnnnnnnnnnnnnnnnnnnnnnnnnnnnnnnnnnnnnnnnnnnnnnnnnnnnnnnnnnnnnnnnnnnnnnnnnnnnnnnnnnnnnnnnnnnnnnnnnnnnnnnnnnnnnnnnnnnnnnnnnnnnnnnnnnnnnnnnnnnnnnnnnnnnnnnnnnnnnnnnnnnnnnnnnnnnnnnnnnnnnnnnnnnnnnnnnnnnnnnnnnnnnnnnnnnnnnnnnnnnnnnnnnnnnnnnnnnnnnnnnnnnnnnnnnnnnnnnnnnnnnnnnnnnnnnnnnnnnnnnnnnnnnnnnnnnnnnnnnnnnnnnnnnnnnnnnnnnnnnnnnnnnnnnnnnnnnnnnnnnnnnnnnnnnnnnnnnnnnnnnnnnnnnnnnnnnnnnnnnnnnnnnnnnnnnnnnnnnnnnnnnnnnnnnnnnnnnnnnnnnnnnnnnnnnnnnnnnnnnnnnnnnnnnnnnnnnnnnnnnnnnnnnnnnnnnnnnnnnnnnnnnnnnnnnnnnnnnnnnnnnnnnnnnnnnnnnnnnnnnnnnnnnnnnnnnnnnnnnnnnnnnnnnnnnnnnnnnnnnnnnnnnnnnnnnnnnnnnnnnnnnnnnnnnnnnnnnnnnnnnnnnnnnnnnnnnnnnnnnnnnnnnnnnnnnnnnnnnnnnnnnnnnnnnnnnnnnnnnnnnnnnnnnnnnnnnnnnnnnnnnnnnnnnnnnnnnnnnnnnnnnnnnnnnnnnnnnnnnnnnnnnnnnnnnnnnnnnnnnnnnnnnnnnnnnnnnnnnnnnnnnnnnnnnnnnnnnnnnnnnnnnnnnnnnnnnnnnnnnnnnnnnnnnnnnnnnnnnnnnnnnnnnnnnnnnnnnnnnnnnnnnnnnnnnnnnnnnnnnnnnnnnnnnnnnnnnnnnnnnnnnnnnnnnnnnnnnnnnnnnnnnnnnnnnnnnnnnnnnnnnnnnnnnnnnnnnnnnnnnnnnnnnnnnnnnnnnnnnnnnnnnnnnnnnnnnnnnnnnnnnnnnnnnnnnnnnnnnnnnnnnnnnnnnnnnnnnnnnnnnnnnnnnnnnnnnnnnnnnnnnnnnnnnnnnnnnnnnnnnnnnnnnnnnnnnnnnnnnnnnnnnnnnnnnnnnnnnnnnnnnnnnnnnnnnnnnnnnnnnnnnnnnnnnnnnnnnnnnnnnnnnnnnnnnnnnnnnnnnnnnnnnnnnnnnnnnnnnnnnnnnnnnnnnnnnnnnnnnnnnnnnnnnnnnnnnnnnnnnnnnnnnnnnnnnnnnnnnnnnnnnnnnnnnnnnnnnnnnnnnnnnnnnnnnnnnnnnnnnnnnnnnnnnnnnnnnnnnnnnnnnnnnnnnnnnnnnnnnnnnnnnnnnnnnnnnnnnnnnnnnnnnnnnnnnnnnnnnnnnnnnnnnnnnnnnnnnnnnnnnnnnnnnnnnnnnnnnnnnnnnnnnnnnnnnnnnnnnnnnnnnnnnnnnnnnnnnnnnnnnnnnnnnnnnnnnnnnnnnnnnnnnnnnnnnnnnnnnnnnnnnnnnnnnnnnnnnnnnnnnnnnnnnnnnnnnnnnnnnnnnnnnnnnnnnnnnnnnnnnnnnnnnnnnnnnnnnnnnnnnnnnnnnnnnnnnnnnnnnnnnnnnnnnnnnnnnnnnnnnnnnnnnnnnnnnnnnnnnnnnnnnnnnnnnnnnnnnnnnnnnnnnnnnnnnnnnnnnnnnnnnnnnnnnnnnnnnnnnnnnnnnnnnnnnnnnnnnnnnnnnnnnnnnnnnnnnnnnnnnnnnnnnnnnnnnnnnnnnnnnnnnnnnnnnnnnnnnnnnnnnnnnnnnnnnnnnnnnnnnnnnnnnnnnnnnnnnnnnnnnnnnnnnnnnnnnnnnnnnnnnnnnnnnnnnnnnnnnnnnnnnnnnnnnnnnnnnnnnnnnnnnnnnnnnnnnnnnnnnnnnnnnnnnnnnnnnnnnnnnnnnnnnnnnnnnnnnnnnnnnnnnnnnnnnnnnnnnnnnnnnnnnnnnnnnnnnnnnnnnnnnnnnnnnnnnnnnnnnnnnnnnnnnnnnnnnnnnnnnnnnnnnnnnnnnnnnnnnnnnnnnnnnnnnnnnnnnnnnnnnnnnnnnnnnnnnnnnnnnnnnnnnnnnnnnnnnnnnnnnnnnnnnnnnnnnnnnnnnnnnnnnnnnnnnnnnnnnnnnnnnnnnnnnnnnnnnnnnnnnnnnnnnnnnnnnnnnnnnnnnnnnnnnnnnnnnnnnnnnnnnnnnnnnnnnnnnnnnnnnnnnnnnnnnnnnnnnnnnnnnnnnnnnnnnnnnnnnnnnnnnnnnnnnnnnnnnnnnnnnnnnnnnnnnnnnnnnnnnnnnnnnnnnnnnnnnnnnnnnnnnnnnnnnnnnnnnnnnnnnnnnnnnnnnnnnnnnnnnnnnnnnnnnnnnnnnnnnnnnnnnnnnnnnnnnnnnnnnnnnnnnnnnnnnnnnnnnnnnnnnnnnnnnnnnnnnnnnnnnnnnnnnnnnnnnnnnnnnnnnnnnnnnnnnnnnnnnnnnnnnnnnnnnnnnnnnnnnnnnnnnnnnnnnnnnnnnnnnnnnnnnnnnnnnnnnnnnnnnnnnnnnnnnnnnnnnnnnnnnnnnnnnnnnnnnnnnnnnnnnnnnnnnnnnnnnnnnnnnnnnnnnnnnnnnnnnnnnnnnnnnnnnnnnnnnnnnnnnnnnnnnnnnnnnnnnnnnnnnnnnnnnnnnnnnnnnnnnnnnnnnnnnnnnnnnnnnnnnnnnnnnnnnnnnnnnnnnnnnnnnnnnnnnnnnnnnnnnnnnnnnnnnnnnnnnnnnnnnnnnnnnnnnnnnnnnnnnnnnnnnnnnnnnnnnnnnnnnnnnnnnnnnnnnnnnnnnnnnnnnnnnnnnnnnnnnnnnnnnnnnnnnnnnnnnnnnnnnnnnnnnnnnnnnnnnnnnnnnnnnnnnnnnnnnnnnnnnnnnnnnnnnnnnnnnnnnnnnnnnnnnnnnnnnnnnnnnnnnnnnnnnnnnnnnnnnnnnnnnnnnnnnnnnnnnnnnnnnnnnnnnnnnnnnnnnnnnnnnnnnnnnnnnnnnnnnnnnnnnnnnnnnnnnnnnnnnnnnnnnnnnnnnnnnnnnnnnnnnnnnnnnnnnnnnnnnnnnnnnnnnnnnnnnnnnnnnnnnnnnnnnnnnnnnnnnnnnnnnnnnnnnnnnnnnnnnnnnnnnnnnnnnnnnnnnnnnnnnnnnnnnnnnnnnnnnnnnnnnnnnnnnnnnnnnnnnnnnnnnnnnnnnnnnnnnnnnnnnnnnnnnnnnnnnnnnnnnnnnnnnnnnnnnnnnnnnnnnnnnnnnnnnnnnnnnnnnnnnnnnnnnnnnnnnnnnnnnnnnnnnnnnnnnnnnnnnnnnnnnnnnnnnnnnnnnnnnnnnnnnnnnnnnnnnnnnnnnnnnnnnnnnnnnnnnnnnnnnnnnnnnnnnnnnnnnnnnnnnnnnnnnnnnnnnnnnnnnnnnnnnnnnnnnnnnnnnnnnnnnnnnnnnnnnnnnnnnnnnnnnnnnnnnnnnnnnnnnnnnnnnnnnnnnnnnnnnnnnnnnnnnnnnnnnnnnnnnnnnnnnnnnnnnnnnnnnnnnnnnnnnnnnnnnnnnnnnnnnnnnnnnnnnnnnnnnnnnnnnnnnnnnnnnnnnnnnnnnnnnnnnnnnnnnnnnnnnnnnnnnnnnnnnnnnnnnnnnnnnnnnnnnnnnnnnnnnnnnnnnnnnnnnnnnnnnnnnnnnnnnnnnnnnnnnnnnnnnnnnnnnnnnnnnnnnnnnnnnnnnnnnnnnnnnnnnnnnnnnnnnnnnnnnnnnnnnnnnnnnnnnnnnnnnnnnnnnnnnnnnnnnnnnnnnnnnnnnnnnnnnnnnnnnnnnnnnnnnnnnnnnnnnnnnnnnnnnnnnnnnnnnnnnnnnnnnnnnnnnnnnnnnnnnnnnnnnnnnnnnnnnnnnnnnnnnnnnnnnnnnnnnnnnnnnnnnnnnnnnnnnnnnnnnnnnnnnnnnnnnnnnnnnnnnnnnnnnnnnnnnnnnnnnnnnnnnnnnnnnnnnnnnnnnnnnnnnnnnnnnnnnnnnnnnnnnnnnnnnnnnnnnnnnnnnnnnnnnnnnnnnnnnnnnnnnnnnnnnnnnnnnnnnnnnnnnnnnnnnnnnnnnnnnnnnnnnnnnnnnnnnnnnnnnnnnnnnnnnnnnnnnnnnnnnnnnnnnnnnnnnnnnnnnnnnnnnnnnnnnnnnnnnnnnnnnnnnnnnnnnnnnnnnnnnnnnnnnnnnnnnnnnnnnnnnnnnnnnnnnnnnnnnnnnnnnnnnnnnnnnnnnnnnnnnnnnnnnnnnnnnnnnnnnnnnnnnnnnnnnnnnnnnnnnnnnnnnnnnnnnnnnnnnnnnnnnnnnnnnnnnnnnnnnnnnnnnnnnnnnnnnnnnnnnnnnnnnnnnnnnnnnnnnnnnnnnnnnnnnnnnnnnnnnnnnnnnnnnnnnnnnnnnnnnnnnnnnnnnnnnnnnnnnnnnnnnnnnnnnnnnnnnnnnnnnnnnnnnnnnnnnnnnnnnnnnnnnnnnnnnnnnnnnnnnnnnnnnnnnnnnnnnnnnnnnnnnnnnnnnnnnnnnnnnnnnnnnnnnnnnnnnnnnnnnnnnnnnnnnnnnnnnnnnnnnnnnnnnnnnnnnnnnnnnnnnnnnnnnnnnnnnnnnnnnnnnnnnnnnnnnnnnnnnnnnnnnnnnnnnnnnnnnnnnnnnnnnnnnnnnnnnnnnnnnnnnnnnnnnnnnnnnnnnnnnnnnnnnnnnnnnnnnnnnnnnnnnnnnnnnnnnnnnnnnnnnnnnnnnnnnnnnnnnnnnnnnnnnnnnnnnnnnnnnnnnnnnnnnnnnnnnnnnnnnnnnnnnnnnnnnnnnnnnnnnnnnnnnnnnnnnnnnnnnnnnnnnnnnnnnnnnnnnnnnnnnnnnnnnnnnnnnnnnnnnnnnnnnnnnnnnnnnnnnnnnnnnnnnnnnnnnnnnnnnnnnnnnnnnnnnnnnnnnnnnnnnnnnnnnnnnnnnnnnnnnnnnnnnnnnnnnnnnnnnnnnnnnnnnnnnnnnnnnnnnnnnnnnnnnnnnnnnnnnnnnnnnnnnnnnnnnnnnnnnnnnnnnnnnnnnnnnnnnnnnnnnnnnnnnnnnnnnnnnnnnnnnnnnnnnnnnnnnnnnnnnnnnnnnnnnnnnnnnnnnnnnnnnnnnnnnnnnnnnnnnnnnnnnnnnnnnnnnnnnnnnnnnnnnnnnnnnnnnnnnnnnnnnnnnnnnnnnnnnnnnnnnnnnnnnnnnnnnnnnnnnnnnnnnnnnnnnnnnnnnnnnnnnnnnnnnnnnnnnnnnnnnnnnnnnnnnnnnnnnnnnnnnnnnnnnnnnnnnnnnnnnnnnnnnnnnnnnnnnnnnnnnnnnnnnnnnnnnnnnnnnnnnnnnnnnnnnnnnnnnnnnnnnnnnnnnnnnnnnnnnnnnnnnnnnnnnnnnnnnnnnnnnnnnnnnnnnnnnnnnnnnnnnnnnnnnnnnnnnnnnnnnnnnnnnnnnnnnnnnnnnnnnnnnnnnnnnnnnnnnnnnnnnnnnnnnnnnnnnnnnnnnnnnnnnnnnnnnnnnnnnnnnnnnnnnnnnnnnnnnnnnnnnnnnnnnnnnnnnnnnnnnnnnnnnnnnnnnnnnnnnnnnnnnnnnnnnnnnnnnnnnnnnnnnnnnnnnnnnnnnnnnnnnnnnnnnnnnnnnnnnnnnnnnnnnnnnnnnnnnnnnnnnnnnnnnnnnnnnnnnnnnnnnnnnnnnnnnnnnnnnnnnnnnnnnnnnnnnnnnnnnnnnnnnnnnnnnnnnnnnnnnnnnnnnnnnnnnnnnnnnnnnnnnnnnnnnnnnnnnnnnnnnnnnnnnnnnnnnnnnnnnnnnnnnnnnnnnnnnnnnnnnnnnnnnnnnnnnnnnnnnnnnnnnnnnnnnnnnnnnnnnnnnnnnnnnnnnnnnnnnnnnnnnnnnnnnnnnnnnnnnnnnnnnnnnnnnnnnnnnnnnnnnnnnnnnnnnnnnnnnnnnnnnnnnnnnnnnnnnnnnnnnnnnnnnnnnnnnnnnnnnnnnnnnnnnnnnnnnnnnnnnnnnnnnnnnnnnnnnnnnnnnnnnnnnnnnnnnnnnnnnnnnnnnnnnnnnnnnnnnnnnnnnnnnnnnnnnnnnnnnnnnnnnnnnnnnnnnnnnnnnnnnnnnnnnnnnnnnnnnnnnnnnnnnnnnnnnnnnnnnnnnnnnnnnnnnnnnnnnnnnnnnnnnnnnnnnnnnnnnnnnnnnnnnnnnnnnnnnnnnnnnnnnnnnnnnnnnnnnnnnnnnnnnnnnnnnnnnnnnnnnnnnnnnnnnnnnnnnnnnnnnnnnnnnnnnnnnnnnnnnnnnnnnnnnnnnnnnnnnnnnnnnnnnnnnnnnnnnnnnnnnnnnnnnnnnnnnnnnnnnnnnnnnnnnnnnnnnnnnnnnnnnnnnnnnnnnnnnnnnnnnnnnnnnnnnnnnnnnnnnnnnnnnnnnnnnnnnnnnnnnnnnnnnnnnnnnnnnnnnnnnnnnnnnnnnnnnnnnnnnnnnnnnnnnnnnnnnnnnnnnnnnnnnnnnnnnnnnnnnnnnnnnnnnnnnnnnnnnnnnnnnnnnnnnnnnnnnnnnnnnnnnnnnnnnnnnnnnnnnnnnnnnnnnnnnnnnnnnnnnnnnnnnnnnnnnnnnnnnnnnnnnnnnnnnnnnnnnnnnnnnnnnnnnnnnnnnnnnnnnnnnnnnnnnnnnnnnnnnnnnnnnnnnnnnnnnnnnnnnnnnnnnnnnnnnnnnnnnnnnnnnnnnnnnnnnnnnnnnnnnnnnnnnnnnnnnnnnnnnnnnnnnnnnnnnnnnnnnnnnnnnnnnnnnnnnnnnnnnnnnnnnnnnnnnnnnnnnnnnnnnnnnnnnnnnnnnnnnnnnnnnnnnnnnnnnnnnnnnnnnnnnnnnnnnnnnnnnnnnnnnnnnnnnnnnnnnnnnnnnnnnnnnnnnnnnnnnnnnnnnnnnnnnnnnnnnnnnnnnnnnnnnnnnnnnnnnnnnnnnnnnnnnnnnnnnnnnnnnnnnnnnnnnnnnnnnnnnnnnnnnnnnnnnnnnnnnnnnnnnnnnnnnnnnnnnnnnnnnnnnnnnnnnnnnnnnnnnnnnnnnnnnnnnnnnnnnnnnnnnnnnnnnnnnnnnnnnnnnnnnnnnnnnnnnnnnnnnnnnnnnnnnnnnnnnnnnnnnnnnnnnnnnnnnnnnnnnnnnnnnnnnnnnnnnnnnnnnnnnnnnnnnnnnnnnnnnnnnnnnnnnnnnnnnnnnnnnnnnnnnnnnnnnnnnnnnnnnnnnnnnnnnnnnnnnnnnnnnnnnnnnnnnnnnnnnnnnnnnnnnnnnnnnnnnnnnnnnnnnnnnnnnnnnnnnnnnnnnnnnnnnnnnnnnnnnnnnnnnnnnnnnnnnnnnnnnnnnnnnnnnnnnnnnnnnnnnnnnnnnnnnnnnnnnnnnnnnnnnnnnnnnnnnnnnnnnnnnnnnnnnnnnnnnnnnnnnnnnnnnnnnnnnnnnnnnnnnnnnnnnnnnnnnnnnnnnnnnnnnnnnnnnnnnnnnnnnnnnnnnnnnnnnnnnnnnnnnnnnnnnnnnnnnnnnnnnnnnnnnnnnnnnnnnnnnnnnnnnnnnnnnnnnnnnnnnnnnnnnnnnnnnnnnnnnnnnnnnnnnnnnnnnnnnnnnnnnnnnnnnnnnnnnnnnnnnnnnnnnnnnnnnnnnnnnnnnnnnnnnnnnnnnnnnnnnnnnnnnnnnnnnnnnnnnnnnnnnnnnnnnnnnnnnnnnnnnnnnnnnnnnnnnnnnnnnnnnnnnnnnnnnnnnnnnnnnnnnnnnnnnnnnnnnnnnnnnnnnnnnnnnnnnnnnnnnnnnnnnnnnnnnnnnnnnnnnnnnnnnnnnnnnnnnnnnnnnnnnnnnnnnnnnnnnnnnnnnnnnnnnnnnnnnnnnnnnnnnnnnnnnnnnnnnnnnnnnnnnnnnnnnnnnnnnnnnnnnnnnnnnnnnnnnnnnnnnnnnnnnnnnnnnnnnnnnnnnnnnnnnnnnnnnnnnnnnnnnnnnnnnnnnnnnnnnnnnnnnnnnnnnnnnnnnnnnnnnnnnnnnnnnnnnnnnnnnnnnnnnnnnnnnnnnnnnnnnnnnnnnnnnnnnnnnnnnnnnnnnnnnnnnnnnnnnnnnnnnnnnnnnnnnnnnnnnnnnnnnnnnnnnnnnnnnnnnnnnnnnnnnnnnnnnnnnnnnnnnnnnnnnnnnnnnnnnnnnnnnnnnnnnnnnnnnnnnnnnnnnnnnnnnnnnnnnnnnnnnnnnnnnnnnnnnnnnnnnnnnnnnnnnnnnnnnnnnnnnnnnnnnnnnnnnnnnnnnnnnnnnnnnnnnnnnnnnnnnnnnnnnnnnnnnnnnnnnnnnnnnnnnnnnnnnnnnnnnnnnnnnnnnnnnnnnnnnnnnnnnnnnnnnnnnnnnnnnnnnnnnnnnnnnnnnnnnnnnnnnnnnnnnnnnnnnnnnnnnnnnnnnnnnnnnnnnnnnnnnnnnnnnnnnnnnnnnnnnnnnnnnnnnnnnnnnnnnnnnnnnnnnnnnnnnnnnnnnnnnnnnnnnnnnnnnnnnnnnnnnnnnnnnnnnnnnnnnnnnnnnnnnnnnnnnnnnnnnnnnnnnnnnnnnnnnnnnnnnnnnnnnnnnnnnnnnnnnnnnnnnnnnnnnnnnnnnnnnnnnnnnnnnnnnnnnnnnnnnnnnnnnnnnnnnnnnnnnnnnnnnnnnnnnnnnnnnnnnnnnnnnnnnnnnnnnnnnnnnnnnnnnnnnnnnnnnnnnnnnnnnnnnnnnnnnnnnnnnnnnnnnnnnnnnnnnnnnnnnnnnnnnnnnnnnnnnnnnnnnnnnnnnnnnnnnnnnnnnnnnnnnnnnnnnnnnnnnnnnnnnnnnnnnnnnnnnnnnnnnnnnnnnnnnnnnnnnnnnnnnnnnnnnnnnnnnnnnnnnnnnnnnnnnnnnnnnnnnnnnnnnnnnnnnnnnnnnnnnnnnnnnnnnnnnnnnnnnnnnnnnnnnnnnnnnnnnnnnnnnnnnnnnnnnnnnnnnnnnnnnnnnnnnnnnnnnnnnnnnnnnnnnnnnnnnnnnnnnnnnnnnnnnnnnnnnnnnnnnnnnnnnnnnnnnnnnnnnnnnnnnnnnnnnnnnnnnnnnnnnnnnnnnnnnnnnnnnnnnnnnnnnnnnnnnnnnnnnnnnnnnnnnnnnnnnnnnnnnnnnnnnnnnnnnnnnnnnnnnnnnnnnnnnnnnnnnnnnnnnnnnnnnnnnnnnnnnnnnnnnnnnnnnnnnnnnnnnnnnnnnnnnnnnnnnnnnnnnnnnnnnnnnnnnnnnnnnnnnnnnnnnnnnnnnnnnnnnnnnnnnnnnnnnnnnnnnnnnnnnnnnnnnnnnnnnnnnnnnnnnnnnnnnnnnnnnnnnnnnnnnnnnnnnnnnnnnnnnnnnnnnnnnnnnnnnnnnnnnnnnnnnnnnnnnnnnnnnnnnnnnnnnnnnnnnnnnnnnnnnnnnnnnnnnnnnnnnnnnnnnnnnnnnnnnnnnnnnnnnnnnnnnnnnnnnnnnnnnnnnnnnnnnnnnnnnnnnnnnnnnnnnnnnnnnnnnnnnnnnnnnnnnnnnnnnnnnnnnnnnnnnnnnnnnnnnnnnnnnnnnnnnnnnnnnnnnnnnnnnnnnnnnnnnnnnnnnnnnnnnnnnnnnnnnnnnnnnnnnnnnnnnnnnnnnnnnnnnnnnnnnnnnnnnnnnnnnnnnnnnnnnnnnnnnnnnnnnnnnnnnnnnnnnnnnnnnnnnnnnnnnnnnnnnnnnnnnnnnnnnnnnnnnnnnnnnnnnnnnnnnnnnnnnnnnnnnnnnnnnnnnnnnnnnnnnnnnnnnnnnnnnnnnnnnnnnnnnnnnnnnnnnnnnnnnnnnnnnnnnnnnnnnnnnnnnnnnnnnnnnnnnnnnnnnnnnnnnnnnnnnnnnnnnnnnnnnnnnnnnnnnnnnnnnnnnnnnnnnnnnnnnnnnnnnnnnnnnnnnnnnnnnnnnnnnnnnnnnnnnnnnnnnnnnnnnnnnnnnnnnnnnnnnnnnnnnnnnnnnnnnnnnnnnnnnnnnnnnnnnnnnnnnnnnnnnnnnnnnnnnnnnnnnnnnnnnnnnnnnnnnnnnnnnnnnnnnnnnnnnnnnnnnnnnnnnnnnnnnnnnnnnnnnnnnnnnnnnnnnnnnnnnnnnnnnnnnnnnnnnnnnnnnnnnnnnnnnnnnnnnnnnnnnnnnnnnnnnnnnnnnnnnnnnnnnnnnnnnnnnnnnnnnnnnnnnnnnnnnnnnnnnnnnnnnnnnnnnnnnnnnnnnnnnnnnnnnnnnnnnnnnnnnnnnnnnnnnnnnnnnnnnnnnnnnnnnnnnnnnnnnnnnnnnnnnnnnnnnnnnnnnnnnnnnnnnnnnnnnnnnnnnnnnnnnnnnnnnnnnnnnnnnnnnnnnnnnnnnnnnnnnnnnnnnnnnnnnnnnnnnnnnnnnnnnnnnnnnnnnnnnnnnnnnnnnnnnnnnnnnnnnnnnnnnnnnnnnnnnnnnnnnnnnnnnnnnnnnnnnnnnnnnnnnnnnnnnnnnnnnnnnnnnnnnnnnnnnnnnnnnnnnnnnnnnnnnnnnnnnnnnnnnnnnnnnnnnnnnnnnnnnnnnnnnnnnnnnnnnnnnnnnnnnnnnnnnnnnnnnnnnnnnnnnnnnnnnnnnnnnnnnnnnnnnnnnnnnnnnnnnnnnnnnnnnnnnnnnnnnnnnnnnnnnnnnnnnnnnnnnnnnnnnnnnnnnnnnnnnnnnnnnnnnnnnnnnnnnnnnnnnnnnnnnnnnnnnnnnnnnnnnnnnnnnnnnnnnnnnnnnnnnnnnnnnnnnnnnnnnnnnnnnnnnnnnnnnnnnnnnnnnnnnnnnnnnnnnnnnnnnnnnnnnnnnnnnnnnnnnnnnnnnnnnnnnnnnnnnnnnnnnnnnnnnnnnnnnnnnnnnnnnnnnnnnnnnnnnnnnnnnnnnnnnnnnnnnnnnnnnnnnnnnnnnnnnnnnnnnnnnnnnnnnnnnnnnnnnnnnnnnnnnnnnnnnnnnnnnnnnnnnnnnnnnnnnnnnnnnnnnnnnnnnnnnnnnnnnnnnnnnnnnnnnnnnnnnnnnnnnnnnnnnnnnnnnnnnnnnnnnnnnnnnnnnnnnnnnnnnnnnnnnnnnnnnnnnnnnnnnnnnnnnnnnnnnnnnnnnnnnnnnnnnnnnnnnnnnnnnnnnnnnnnnnnnnnnnnnnnnnnnnnnnnnnnnnnnnnnnnnnnnnnnnnnnnnnnnnnnnnnnnnnnnnnnnnnnnnnnnnnnnnnnnnnnnnnnnnnnnnnnnnnnnnnnnnnnnnnnnnnnnnnnnnnnnnnnnnnnnnnnnnnnnnnnnnnnnnnnnnnnnnnnnnnnnnnnnnnnnnnnnnnnnnnnnnnnnnnnnnnnnnnnnnnnnnnnnnnnnnnnnnnnnnnnnnnnnnnnnnnnnnnnnnnnnnnnnnnnnnnnnnnnnnnnnnnnnnnnnnnnnnnnnnnnnnnnnnnnnnnnnnnnnnnnnnnnnnnnnnnnnnnnnnnnnnnnnnnnnnnnnnnnnnnnnnnnnnnnnnnnnnnnnnnnnnnnnnnnnnnnnnnnnnnnnnnnnnnnnnnnnnnnnnnnnnnnnnnnnnnnnnnnnnnnnnnnnnnnnnnnnnnnnnnnnnnnnnnnnnnnnnnnnnnnnnnnnnnnnnnnnnnnnnnnnnnnnnnnnnnnnnnnnnnnnnnnnnnnnnnnnnnnnnnnnnnnnnnnnnnnnnnnnnnnnnnnnnnnnnnnnnnnnnnnnnnnnnnnnnnnnnnnnnnnnnnnnnnnnnnnnnnnnnnnnnnnnnnnnnnnnnnnnnnnnnnnnnnnnnnnnnnnnnnnnnnnnnnnnnnnnnnnnnnnnnnnnnnnnnnnnnnnnnnnnnnnnnnnnnnnnnnnnnnnnnnnnnnnnnnnnnnnnnnnnnnnnnnnnnnnnnnnnnnnnnnnnnnnnnnnnnnnnnnnnnnnnnnnnnnnnnnnnnnnnnnnnnnnnnnnnnnnnnnnnnnnnnnnnnnnnnnnnnnnnnnnnnnnnnnnnnnnnnnnnnnnnnnnnnnnnnnnnnnnnnnnnnnnnnnnnnnnnnnnnnnnnnnnnnnnnnnnnnnnnnnnnnnnnnnnnnnnnnnnnnnnnnnnnnnnnnnnnnnnnnnnnnnnnnnnnnnnnnnnnnnnnnnnnnnnnnnnnnnnnnnnnnnnnnnnnnnnnnnnnnnnnnnnnnnnnnnnnnnnnnnnnnnnnnnnnnnnnnnnnnnnnnnnnnnnnnnnnnnnnnnnnnnnnnnnnnnnnnnnnnnnnnnnnnnnnnnnnnnnnnnnnnnnnnnnnnnnnnnnnnnnnnnnnnnnnnnnnnnnnnnnnnnnnnnnnnnnnnnnnnnnnnnnnnnnnnnnnnnnnnnnnnnnnnnnnnnnnnnnnnnnnnnnnnnnnnnnnnnnnnnnnnnnnnnnnnnnnnnnnnnnnnnnnnnnnnnnnnnnnnnnnnnnnnnnnnnnnnnnnnnnnnnnnnnnnnnnnnnnnnnnnnnnnnnnnnnnnnnnnnnnnnnnnnnnnnnnnnnnnnnnnnnnnnnnnnnnnnnnnnnnnnnnnnnnnnnnnnnnnnnnnnnnnnnnnnnnnnnnnnnnnnnnnnnnnnnnnnnnnnnnnnnnnnnnnnnnnnnnnnnnnnnnnnnnnnnnnnnnnnnnnnnnnnnnnnnnnnnnnnnnnnnnnnnnnnnnnnnnnnnnnnnnnnnnnnnnnnnnnnnnnnnnnnnnnnnnnnnnnnnnnnnnnnnnnnnnnnnnnnnnnnnnnnnnnnnnnnnnnnnnnnnnnnnnnnnnnnnnnnnnnnnnnnnnnnnnnnnnnnnnnnnnnnnnnnnnnnnnnnnnnnnnnnnnnnnnnnnnnnnnnnnnnnnnnnnnnnnnnnnnnnnnnnnnnnnnnnnnnnnnnnnnnnnnnnnnnnnnnnnnnnnnnnnnnnnnnnnnnnnnnnnnnnnnnnnnnnnnnnnnnnnnnnnnnnnnnnnnnnnnnnnnnnnnnnnnnnnnnnnnnnnnnnnnnnnnnnnnnnnnnnnnnnnnnnnnnnnnnnnnnnnnnnnnnnnnnnnnnnnnnnnnnnnnnnnnnnnnnnnnnnnnnnnnnnnnnnnnnnnnnnnnnnnnnnnnnnnnnnnnnnnnnnnnnnnnnnnnnnnnnnnnnnnnnnnnnnnnnnnnnnnnnnnnnnnnnnnnnnnnnnnnnnnnnnnnnnnnnnnnnnnnnnnnnnnnnnnnnnnnnnnnnnnnnnnnnnnnnnnnnnnnnnnnnnnnnnnnnnnnnnnnnnnnnnnnnnnnnnnnnnnnnnnnnnnnnnnnnnnnnnnnnnnnnnnnnnnnnnnnnnnnnnnnnnnnnnnnnnnnnnnnnnnnnnnnnnnnnnnnnnnnnnnnnnnnnnnnnnnnnnnnnnnnnnnnnnnnnnnnnnnnnnnnnnnnnnnnnnnnnnnnnnnnnnnnnnnnnnnnnnnnnnnnnnnnnnnnnnnnnnnnnnnnnnnnnnnnnnnnnnnnnnnnnnnnnnnnnnnnnnnnnnnnnnnnnnnnnnnnnnnnnnnnnnnnnnnnnnnnnnnnnnnnnnnnnnnnnnnnnnnnnnnnnnnnnnnnnnnnnnnnnnnnnnnnnnnnnnnnnnnnnnnnnnnnnnnnnnnnnnnnnnnnnnnnnnnnnnnnnnnnnnnnnnnnnnnnnnnnnnnnnnnnnnnnnnnnnnnnnnnnnnnnnnnnnnnnnnnnnnnnnnnnnnnnnnnnnnnnnnnnnnnnnnnnnnnnnnnnnnnnnnnnnnnnnnnnnnnnnnnnnnnnnnnnnnnnnnnnnnnnnnnnnnnnnnnnnnnnnnnnnnnnnnnnnnnnnnnnnnnnnnnnnnnnnnnnnnnnnnnnnnnnnnnnnnnnnnnnnnnnnnnnnnnnnnnnnnnnnnnnnnnnnnnnnnnnnnnnnnnnnnnnnnnnnnnnnnnnnnnnnnnnnnnnnnnnnnnnnnnnnnnnnnnnnnnnnnnnnnnnnnnnnnnnnnnnnnnnnnnnnnnnnnnnnnnnnnnnnnnnnnnnnnnnnnnnnnnnnnnnnnnnnnnnnnnnnnnnnnnnnnnnnnnnnnnnnnnnnnnnnnnnnnnnnnnnnnnnnnnnnnnnnnnnnnnnnnnnnnnnnnnnnnnnnnnnnnnnnnnnnnnnnnnnnnnnnnnnnnnnnnnnnnnnnnnnnnnnnnnnnnnnnnnnnnnnnnnnnnnnnnnnnnnnnnnnnnnnnnnnnnnnnnnnnnnnnnnnnnnnnnnnnnnnnnnnnnnnnnnnnnnnnnnnnnnnnnnnnnnnnnnnnnnnnnnnnnnnnnnnnnnnnnnnnnnnnnnnnnnnnnnnnnnnnnnnnnnnnnnnnnnnnnnnnnnnnnnnnnnnnnnnnnnnnnnnnnnnnnnnnnnnnnnnnnnnnnnnnnnnnnnnnnnnnnnnnnnnnnnnnnnnnnnnnnnnnnnnnnnnnnnnnnnnnnnnnnnnnnnnnnnnnnnnnnnnnnnnnnnnnnnnnnnnnnnnnnnnnnnnnnnnnnnnnnnnnnnnnnnnnnnnnnnnnnnnnnnnnnnnnnnnnnnnnnnnnnnnnnnnnnnnnnnnnnnnnnnnnnnnnnnnnnnnnnnnnnnnnnnnnnnnnnnnnnnnnnnnnnnnnnnnnnnnnnnnnnnnnnnnnnnnnnnnnnnnnnnnnnnnnnnnnnnnnnnnnnnnnnnnnnnnnnnnnnnnnnnnnnnnnnnnnnnnnnnnnnnnnnnnnnnnnnnnnnnnnnnnnnnnnnnnnnnnnnnnnnnnnnnnnnnnnnnnnnnnnnnnnnnnnnnnnnnnnnnnnnnnnnnnnnnnnnnnnnnnnnnnnnnnnnnnnnnnnnnnnnnnnnnnnnnnnnnnnnnnnnnnnnnnnnnnnnnnnnnnnnnnnnnnnnnnnnnnnnnnnnnnnnnnnnnnnnnnnnnnnnnnnnnnnnnnnnnnnnnnnnnnnnnnnnnnnnnnnnnnnnnnnnnnnnnnnnnnnnnnnnnnnnnnnnnnnnnnnnnnnnnnnnnnnnnnnnnnnnnnnnnnnnnnnnnnnnnnnnnnnnnnnnnnnnnnnnnnnnnnnnnnnnnnnnnnnnnnnnnnnnnnnnnnnnnnnnnnnnnnnnnnnnnnnnnnnnnnnnnnnnnnnnnnnnnnnnnnnnnnnnnnnnnnnnnnnnnnnnnnnnnnnnnnnnnnnnnnnnnnnnnnnnnnnnnnnnnnnnnnnnnnnnnnnnnnnnnnnnnnnnnnnnnnnnnnnnnnnnnnnnnnnnnnnnnnnnnnnnnnnnnnnnnnnnnnnnnnnnnnnnnnnnnnnnnnnnnnnnnnnnnnnnnnnnnnnnnnnnnnnnnnnnnnnnnnnnnnnnnnnnnnnnnnnnnnnnnnnnnnnnnnnnnnnnnnnnnnnnnnnnnnnnnnnnnnnnnnnnnnnnnnnnnnnnnnnnnnnnnnnnnnnnnnnnnnnnnnnnnnnnnnnnnnnnnnnnnnnnnnnnnnnnnnnnnnnnnnnnnnnnnnnnnnnnnnnnnnnnnnnnnnnnnnnnnnnnnnnnnnnnnnnnnnnnnnnnnnnnnnnnnnnnnnnnnnnnnnnnnnnnnnnnnnnnnnnnnnnnnnnnnnnnnnnnnnnnnnnnnnnnnnnnnnnnnnnnnnnnnnnnnnnnnnnnnnnnnnnnnnnnnnnnnnnnnnnnnnnnnnnnnnnnnnnnnnnnnnnnnnnnnnnnnnnnnnnnnnnnnnnnnnnnnnnnnnnnnnnnnnnnnnnnnnnnnnnnnnnnnnnnnnnnnnnnnnnnnnnnnnnnnnnnnnnnnnnnnnnnnnnnnnnnnnnnnnnnnnnnnnnnnnnnnnnnnnnnnnnnnnnnnnnnnnnnnnnnnnnnnnnnnnnnnnnnnnnnnnnnnnnnnnnnnnnnnnnnnnnnnnnnnnnnnnnnnnnnnnnnnnnnnnnnnnnnnnnnnnnnnnnnnnnnnnnnnnnnnnnnnnnnnnnnnnnnnnnnnnnnnnnnnnnnnnnnnnnnnnnnnnnnnnnnnnnnnnnnnnnnnnnnnnnnnnnnnnnnnnnnnnnnnnnnnnnnnnnnnnnnnnnnnnnnnnnnnnnnnnnnnnnnnnnnnnnnnnnnnnnnnnnnnnnnnnnnnnnnnnnnnnnnnnnnnnnnnnnnnnnnnnnnnnnnnnnnnnnnnnnnnnnnnnnnnnnnnnnnnnnnnnnnnnnnnnnnnnnnnnnnnnnnnnnnnnnnnnnnnnnnnnnnnnnnnnnnnnnnnnnnnnnnnnnnnnnnnnnnnnnnnnnnnnnnnnnnnnnnnnnnnnnnnnnnnnnnnnnnnnnnnnnnnnnnnnnnnnnnnnnnnnnnnnnnnnnnnnnnnnnnnnnnnnnnnnnnnnnnnnnnnnnnnnnnnnnnnnnnnnnnnnnnnnnnnnnnnnnnnnnnnnnnnnnnnnnnnnnnnnnnnnnnnnnnnnnnnnnnnnnnnnnnnnnnnnnnnnnnnnnnnnnnnnnnnnnnnnnnnnnnnnnnnnnnnnnnnnnnnnnnnnnnnnnnnnnnnnnnnnnnnnnnnnnnnnnnnnnnnnnnnnnnnnnnnnnnnnnnnnnnnnnnnnnnnnnnnnnnnnnnnnnnnnnnnnnnnnnnnnnnnnnnnnnnnnnnnnnnnnnnnnnnnnnnnnnnnnnnnnnnnnnnnnnnnnnnnnnnnnnnnnnnnnnnnnnnnnnnnnnnnnnnnnnnnnnnnnnnnnnnnnnnnnnnnnnnnnnnnnnnnnnnnnnnnnnnnnnnnnnnnnnnnnnnnnnnnnnnnnnnnnnnnnnnnnnnnnnnnnnnnnnnnnnnnnnnnnnnnnnnnnnnnnnnnnnnnnnnnnnnnnnnnnnnnnnnnnnnnnnnnnnnnnnnnnnnnnnnnnnnnnnnnnnnnnnnnnnnnnnnnnnnnnnnnnnnnnnnnnnnnnnnnnnnnnnnnnnnnnnnnnnnnnnnnnnnnnnnnnnnnnnnnnnnnnnnnnnnnnnnnnnnnnnnnnnnnnnnnnnnnnnnnnnnnnnnnnnnnnnnnnnnnnnnnnnnnnnnnnnnnnnnnnnnnnnnnnnnnnnnnnnnnnnnnnnnnnnnnnnnnnnnnnnnnnnnnnnnnnnnnnnnnnnnnnnnnnnnnnnnnnnnnnnnnnnnnnnnnnnnnnnnnnnnnnnnnnnnnnnnnnnnnnnnnnnnnnnnnnnnnnnnnnnnnnnnnnnnnnnnnnnnnnnnnnnnnnnnnnnnnnnnnnnnnnnnnnnnnnnnnnnnnnnnnnnnnnnnnnnnnnnnnnnnnnnnnnnnnnnnnnnnnnnnnnnnnnnnnnnnnnnnnnnnnnnnnnnnnnnnnnnnnnnnnnnnnnnnnnnnnnnnnnnnnnnnnnnnnnnnnnnnnnnnnnnnnnnnnnnnnnnnnnnnnnnnnnnnnnnnnnnnnnnnnnnnnnnnnnnnnnnnnnnnnnnnnnnnnnnnnnnnnnnnnnnnnnnnnnnnnnnnnnnnnnnnnnnnnnnnnnnnnnnnnnnnnnnnnnnnnnnnnnnnnnnnnnnnnnnnnnnnnnnnnnnnnnnnnnnnnnnnnnnnnnnnnnnnnnnnnnnnnnnnnnnnnnnnnnnnnnnnnnnnnnnnnnnnnnnnnnnnnnnnnnnnnnnnnnnnnnnnnnnnnnnnnnnnnnnnnnnnnnnnnnnnnnnnnnnnnnnnnnnnnnnnnnnnnnnnnnnnnnnnnnnnnnnnnnnnnnnnnnnnnnnnnnnnnnnnnnnnnnnnnnnnnnnnnnnnnnnnnnnnnnnnnnnnnnnnnnnnnnnnnnnnnnnnnnnnnnnnnnnnnnnnnnnnnnnnnnnnnnnnnnnnnnnnnnnnnnnnnnnnnnnnnnnnnnnnnnnnnnnnnnnnnnnnnnnnnnnnnnnnnnnnnnnnnnnnnnnnnnnnnnnnnnnnnnnnnnnnnnnnnnnnnnnnnnnnnnnnnnnnnnnnnnnnnnnnnnnnnnnnnnnnnnnnnnnnnnnnnnnnnnnnnnnnnnnnnnnnnnnnnnnnnnnnnnnnnnnnnnnnnnnnnnnnnnnnnnnnnnnnnnnnnnnnnnnnnnnnnnnnnnnnnnnnnnnnnnnnnnnnnnnnnnnnnnnnnnnnnnnnnnnnnnnnnnnnnnnnnnnnnnnnnnnnnnnnnnnnnnnnnnnnnnnnnnnnnnnnnnnnnnnnnnnnnnnnnnnnnnnnnnnnnnnnnnnnnnnnnnnnnnnnnnnnnnnnnnnnnnnnnnnnnnnnnnnnnnnnnnnnnnnnnnnnnnnnnnnnnnnnnnnnnnnnnnnnnnnnnnnnnnnnnnnnnnnnnnnnnnnnnnnnnnnnnnnnnnnnnnnnnnnnnnnnnnnnnnnnnnnnnnnnnnnnnnnnnnnnnnnnnnnnnnnnnnnnnnnnnnnnnnnnnnnnnnnnnnnnnnnnnnnnnnnnnnnnnnnnnnnnnnnnnnnnnnnnnnnnnnnnnnnnnnnnnnnnnnnnnnnnnnnnnnnnnnnnnnnnnnnnnnnnnnnnnnnnnnnnnnnnnnnnnnnnnnnnnnnnnnnnnnnnnnnnnnnnnnnnnnnnnnnnnnnnnnnnnnnnnnnnnnnnnnnnnnnnnnnnnnnnnnnnnnnnnnnnnnnnnnnnnnnnnnnnnnnnnnnnnnnnnnnnnnnnnnnnnnnnnnnnnnnnnnnnnnnnnnnnnnnnnnnnnnnnnnnnnnnnnnnnnnnnnnnnnnnnnnnnnnnnnnnnnnnnnnnnnnnnnnnnnnnnnnnnnnnnnnnnnnnnnnnnnnnnnnnnnnnnnnnnnnnnnnnnnnnnnnnnnnnnnnnnnnnnnnnnnnnnnnnnnnnnnnnnnnnnnnnnnnnnnnnnnnnnnnnnnnnnnnnnnnnnnnnnnnnnnnnnnnnnnnnnnnnnnnnnnnnnnnnnnnnnnnnnnnnnnnnnnnnnnnnnnnnnnnnnnnnnnnnnnnnnnnnnnnnnnnnnnnnnnnnnnnnnnnnnnnnnnnnnnnnnnnnnnnnnnnnnnnnnnnnnnnnnnnnnnnnnnnnnnnnnnnnnnnnnnnnnnnnnnnnnnnnnnnnnnnnnnnnnnnnnnnnnnnnnnnnnnnnnnnnnnnnnnnnnnnnnnnnnnnnnnnnnnnnnnnnnnnnnnnnnnnnnnnnnnnnnnnnnnnnnnnnnnnnnnnnnnnnnnnnnnnnnnnnnnnnnnnnnnnnnnnnnnnnnnnnnnnnnnnnnnnnnnnnnnnnnnnnnnnnnnnnnnnnnnnnnnnnnnnnnnnnnnnnnnnnnnnnnnnnnnnnnnnnnnnnnnnnnnnnnnnnnnnnnnnnnnnnnnnnnnnnnnnnnnnnnnnnnnnnnnnnnnnnnnnnnnnnnnnnnnnnnnnnnnnnnnnnnnnnnnnnnnnnnnnnnnnnnnnnnnnnnnnnnnnnnnnnnnnnnnnnnnnnnnnnnnnnnnnnnnnnnnnnnnnnnnnnnnnnnnnnnnnnnnnnnnnnnnnnnnnnnnnnnnnnnnnnnnnnnnnnnnnnnnnnnnnnnnnnnnnnnnnnnnnnnnnnnnnnnnnnnnnnnnnnnnnnnnnnnnnnnnnnnnnnnnnnnnnnnnnnnnnnnnnnnnnnnnnnnnnnnnnnnnnnnnnnnnnnnnnnnnnnnnnnnnnnnnnnnnnnnnnnnnnnnnnnnnnnnnnnnnnnnnnnnnnnnnnnnnnnnnnnnnnnnnnnnnnnnnnnnnnnnnnnnnnnnnnnnnnnnnnnnnnnnnnnnnnnnnnnnnnnnnnnnnnnnnnnnnnnnnnnnnnnnnnnnnnnnnnnnnnnnnnnnnnnnnnnnnnnnnnnnnnnnnnnnnnnnnnnnnnnnnnnnnnnnnnnnnnnnnnnnnnnnnnnnnnnnnnnnnnnnnnnnnnnnnnnnnnnnnnnnnnnnnnnnnnnnnnnnnnnnnnnnnnnnnnnnnnnnnnnnnnnnnnnnnnnnnnnnnnnnnnnnnnnnnnnnnnnnnnnnnnnnnnnnnnnnnnnnnnnnnnnnnnnnnnnnnnnnnnnnnnnnnnnnnnnnnnnnnnnnnnnnnnnnnnnnnnnnnnnnnnnnnnnnnnnnnnnnnnnnnnnnnnnnnnnnnnnnnnnnnnnnnnnnnnnnnnnnnnnnnnnnnnnnnnnnnnnnnnnnnnnnnnnnnnnnnnnnnnnnnnnnnnnnnnnnnnnnnnnnnnnnnnnnnnnnnnnnnnnnnnnnnnnnnnnnnnnnnnnnnnnnnnnnnnnnnnnnnnnnnnnnnnnnnnnnnnnnnnnnnnnnnnnnnnnnnnnnnnnnnnnnnnnnnnnnnnnnnnnnnnnnnnnnnnnnnnnnnnnnnnnnnnnnnnnnnnnnnnnnnnnnnnnnnnnnnnnnnnnnnnnnnnnnnnnnnnnnnnnnnnnnnnnnnnnnnnnnnnnnnnnnnnnnnnnnnnnnnnnnnnnnnnnnnnnnnnnnnnnnnnnnnnnnnnnnnnnnnnnnnnnnnnnnnnnnnnnnnnnnnnnnnnnnnnnnnnnnnnnnnnnnnnnnnnnnnnnnnnnnnnnnnnnnnnnnnnnnnnnnnnnnnnnnnnnnnnnnnnnnnnnnnnnnnnnnnnnnnnnnnnnnnnnnnnnnnnnnnnnnnnnnnnnnnnnnnnnnnnnnnnnnnnnnnnnnnnnnnnnnnnnnnnnnnnnnnnnnnnnnnnnnnnnnnnnnnnnnnnnnnnnnnnnnnnnnnnnnnnnnnnnnnnnnnnnnnnnnnnnnnnnnnnnnnnnnnnnnnnnnnnnnnnnnnnnnnnnnnnnnnnnnnnnnnnnnnnnnnnnnnnnnnnnnnnnnnnnnnnnnnnnnnnnnnnnnnnnnnnnnnnnnnnnnnnnnnnnnnnnnnnnnnnnnnnnnnnnnnnnnnnnnnnnnnnnnnnnnnnnnnnnnnnnnnnnnnnnnnnnnnnnnnnnnnnnnnnnnnnnnnnnnnnnnnnnnnnnnnnnnnnnnnnnnnnnnnnnnnnnnnnnnnnnnnnnnnnnnnnnnnnnnnnnnnnnnnnnnnnnnnnnnnnnnnnnnnnnnnnnnnnnnnnnnnnnnnnnnnnnnnnnnnnnnnnnnnnnnnnnnnnnnnnnnnnnnnnnnnnnnnnnnnnnnnnnnnnnnnnnnnnnnnnnnnnnnnnnnnnnnnnnnnnnnnnnnnnnnnnnnnnnnnnnnnnnnnnnnnnnnnnnnnnnnnnnnnnnnnnnnnnnnnnnnnnnnnnnnnnnnnnnnnnnnnnnnnnnnnnnnnnnnnnnnnnnnnnnnnnnnnnnnnnnnnnnnnnnnnnnnnnnnnnnnnnnnnnnnnnnnnnnnnnnnnnnnnnnnnnnnnnnnnnnnnnnnnnnnnnnnnnnnnnnnnnnnnnnnnnnnnnnnnnnnnnnnnnnnnnnnnnnnnnnnnnnnnnnnnnnnnnnnnnnnnnnnnnnnnnnnnnnnnnnnnnnnnnnnnnnnnnnnnnnnnnnnnnnnnnnnnnnnnnnnnnnnnnnnnnnnnnnnnnnnnnnnnnnnnnnnnnnnnnnnnnnnnnnnnnnnnnnnnnnnnnnnnnnnnnnnnnnnnnnnnnnnnnnnnnnnnnnnnnnnnnnnnnnnnnnnnnnnnnnnnnnnnnnnnnnnnnnnnnnnnnnnnnnnnnnnnnnnnnnnnnnnnnnnnnnnnnnnnnnnnnnnnnnnnnnnnnnnnnnnnnnnnnnnnnnnnnnnnnnnnnnnnnnnnnnnnnnnnnnnnnnnnnnnnnnnnnnnnnnnnnnnnnnnnnnnnnnnnnnnnnnnnnnnnnnnnnnnnnnnnnnnnnnnnnnnnnnnnnnnnnnnnnnnnnnnnnnnnnnnnnnnnnnnnnnnnnnnnnnnnnnnnnnnnnnnnnnnnnnnnnnnnnnnnnnnnnnnnnnnnnnnnnnnnnnnnnnnnnnnnnnnnnnnnnnnnnnnnnnnnnnnnnnnnnnnnnnnnnnnnnnnnnnnnnnnnnnnnnnnnnnnnnnnnnnnnnnnnnnnnnnnnnnnnnnnnnnnnnnnnnnnnnnnnnnnnnnnnnnnnnnnnnnnnnnnnnnnnnnnnnnnnnnnnnnnnnnnnnnnnnnnnnnnnnnnnnnnnnnnnnnnnnnnnnnnnnnnnnnnnnnnnnnnnnnnnnnnnnnnnnnnnnnnnnnnnnnnnnnnnnnnnnnnnnnnnnnnnnnnnnnnnnnnnnnnnnnnnnnnnnnnnnnnnnnnnnnnnnnnnnnnnnnnnnnnnnnnnnnnnnnnnnnnnnnnnnnnnnnnnnnnnnnnnnnnnnnnnnnnnnnnnnnnnnnnnnnnnnnnnnnnnnnnnnnnnnnnnnnnnnnnnnnnnnnnnnnnnnnnnnnnnnnnnnnnnnnnnnnnnnnnnnnnnnnnnnnnnnnnnnnnnnnnnnnnnnnnnnnnnnnnnnnnnnnnnnnnnnnnnnnnnnnnnnnnnnnnnnnnnnnnnnnnnnnnnnnnnnnnnnnnnnnnnnnnnnnnnnnnnnnnnnnnnnnnnnnnnnnnnnnnnnnnnnnnnnnnnnnnnnnnnnnnnnnnnnnnnnnnnnnnnnnnnnnnnnnnnnnnnnnnnnnnnnnnnnnnnnnnnnnnnnnnnnnnnnnnnnnnnnnnnnnnnnnnnnnnnnnnnnnnnnnnnnnnnnnnnnnnnnnnnnnnnnnnnnnnnnnnnnnnnnnnnnnnnnnnnnnnnnnnnnnnnnnnnnnnnnnnnnnnnnnnnnnnnnnnnnnnnnnnnnnnnnnnnnnnnnnnnnnnnnnnnnnnnnnnnnnnnnnnnnnnnnnnnnnnnnnnnnnnnnnnnnnnnnnnnnnnnnnnnnnnnnnnnnnnnnnnnnnnnnnnnnnnnnnnnnnnnnnnnnnnnnnnnnnnnnnnnnnnnnnnnnnnnnnnnnnnnnnnnnnnnnnnnnnnnnnnnnnnnnnnnnnnnnnnnnnnnnnnnnnnnnnnnnnnnnnnnnnnnnnnnnnnnnnnnnnnnnnnnnnnnnnnnnnnnnnnnnnnnnnnnnnnnnnnnnnnnnnnnnnnnnnnnnnnnnnnnnnnnnnnnnnnnnnnnnnnnnnnnnnnnnnnnnnnnnnnnnnnnnnnnnnnnnnnnnnnnnnnnnnnnnnnnnnnnnnnnnnnnnnnnnnnnnnnnnnnnnnnnnnnnnnnnnnnnnnnnnnnnnnnnnnnnnnnnnnnnnnnnnnnnnnnnnnnnnnnnnnnnnnnnnnnnnnnnnnnnnnnnnnnnnnnnnnnnnnnnnnnnnnnnnnnnnnnnnnnnnnnnnnnnnnnnnnnnnnnnnnnnnnnnnnnnnnnnnnnnnnnnnnnnnnnnnnnnnnnnnnnnnnnnnnnnnnnnnnnnnnnnnnnnnnnnnnnnnnnnnnnnnnnnnnnnnnnnnnnnnnnnnnnnnnnnnnnnnnnnnnnnnnnnnnnnnnnnnnnnnnnnnnnnnnnnnnnnnnnnnnnnnnnnnnnnnnnnnnnnnnnnnnnnnnnnnnnnnnnnnnnnnnnnnnnnnnnnnnnnnnnnnnnnnnnnnnnnnnnnnnnnnnnnnnnnnnnnnnnnnnnnnnnnnnnnnnnnnnnnnnnnnnnnnnnnnnnnnnnnnnnnnnnnnnnnnnnnnnnnnnnnnnnnnnnnnnnnnnnnnnnnnnnnnnnnnnnnnnnnnnnnnnnnnnnnnnnnnnnnnnnnnnnnnnnnnnnnnnnnnnnnnnnnnnnnnnnnnnnnnnnnnnnnnnnnnnnnnnnnnnnnnnnnnnnnnnnnnnnnnnnnnnnnnnnnnnnnnnnnnnnnnnnnnnnnnnnnnnnnnnnnnnnnnnnnnnnnnnnnnnnnnnnnnnnnnnnnnnnnnnnnnnnnnnnnnnnnnnnnnnnnnnnnnnnnnnnnnnnnnnnnnnnnnnnnnnnnnnnnnnnnnnnnnnnnnnnnnnnnnnnnnnnnnnnnnnnnnnnnnnnnnnnnnnnnnnnnnnnnnnnnnnnnnnnnnnnnnnnnnnnnnnnnnnnnnnnnnnnnnnnnnnnnnnnnnnnnnnnnnnnnnnnnnnnnnnnnnnnnnnnnnnnnnnnnnnnnnnnnnnnnnnnnnnnnnnnnnnnnnnnnnnnnnnnnnnnnnnnnnnnnnnnnnnnnnnnnnnnnnnnnnnnnnnnnnnnnnnnnnnnnnnnnnnnnnnnnnnnnnnnnnnnnnnnnnnnnnnnnnnnnnnnnnnnnnnnnnnnnnnnnnnnnnnnnnnnnnnnnnnnnnnnnnnnnnnnnnnnnnnnnnnnnnnnnnnnnnnnnnnnnnnnnnnnnnnnnnnnnnnnnnnnnnnnnnnnnnnnnnnnnnnnnnnnnnnnnnnnnnnnnnnnnnnnnnnnnnnnnnnnnnnnnnnnnnnnnnnnnnnnnnnnnnnnnnnnnnnnnnnnnnnnnnnnnnnnnnnnnnnnnnnnnnnnnnnnnnnnnnnnnnnnnnnnnnnnnnnnnnnnnnnnnnnnnnnnnnnnnnnnnnnnnnnnnnnnnnnnnnnnnnnnnnnnnnnnnnnnnnnnnnnnnnnnnnnnnnnnnnnnnnnnnnnnnnnnnnnnnnnnnnnnnnnnnnnnnnnnnnnnnnnnnnnnnnnnnnnnnnnnnnnnnnnnnnnnnnnnnnnnnnnnnnnnnnnnnnnnnnnnnnnnnnnnnnnnnnnnnnnnnnnnnnnnnnnnnnnnnnnnnnnnnnnnnnnnnnnnnnnnnnnnnnnnnnnnnnnnnnnnnnnnnnnnnnnnnnnnnnnnnnnnnnnnnnnnnnnnnnnnnnnnnnnnnnnnnnnnnnnnnnnnnnnnnnnnnnnnnnnnnnnnnnnnnnnnnnnnnnnnnnnnnnnnnnnnnnnnnnnnnnnnnnnnnnnnnnnnnnnnnnnnnnnnnnnnnnnnnnnnnnnnnnnnnnnnnnnnnnnnnnnnnnnnnnnnnnnnnnnnnnnnnnnnnnnnnnnnnnnnnnnnnnnnnnnnnnnnnnnnnnnnnnnnnnnnnnnnnnnnnnnnnnnnnnnnnnnnnnnnnnnnnnnnnnnnnnnnnnnnnnnnnnnnnnnnnnnnnnnnnnnnnnnnnnnnnnnnnnnnnnnnnnnnnnnnnnnnnnnnnnnnnnnnnnnnnnnnnnnnnnnnnnnnnnnnnnnnnnnnnnnnnnnnnnnnnnnnnnnnnnnnnnnnnnnnnnnnnnnnnnnnnnnnnnnnnnnnnnnnnnnnnnnnnnnnnnnnnnnnnnnnnnnnnnnnnnnnnnnnnnnnnnnnnnnnnnnnnnnnnnnnnnnnnnnnnnnnnnnnnnnnnnnnnnnnnnnnnnnnnnnnnnnnnnnnnnnnnnnnnnnnnnnnnnnnnnnnnnnnnnnnnnnnnnnnnnnnnnnnnnnnnnnnnnnnnnnnnnnnnnnnnnnnnnnnnnnnnnnnnnnnnnnnnnnnnnnnnnnnnnnnnnnnnnnnnnnnnnnnnnnnnnnnnnnnnnnnnnnnnnnnnnnnnnnnnnnnnnnnnnnnnnnnnnnnnnnnnnnnnnnnnnnnnnnnnnnnnnnnnnnnnnnnnnnnnnnnnnnnnnnnnnnnnnnnnnnnnnnnnnnnnnnnnnnnnnnnnnnnnnnnnnnnnnnnnnnnnnnnnnnnnnnnnnnnnnnnnnnnnnnnnnnnnnnnnnnnnnnnnnnnnnnnnnnnnnnnnnnnnnnnnnnnnnnnnnnnnnnnnnnnnnnnnnnnnnnnnnnnnnnnnnnnnnnnnnnnnnnnnnnnnnnnnnnnnnnnnnnnnnnnnnnnnnnnnnnnnnnnnnnnnnnnnnnnnnnnnnnnnnnnnnnnnnnnnnnnnnnnnnnnnnnnnnnnnnnnnnnnnnnnnnnnnnnnnnnnnnnnnnnnnnnnnnnnnnnnnnnnnnnnnnnnnnnnnnnnnnnnnnnnnnnnnnnnnnnnnnnnnnnnnnnnnnnnnnnnnnnnnnnnnnnnnnnnnnnnnnnnnnnnnnnnnnnnnnnnnnnnnnnnnnnnnnnnnnnnnnnnnnnnnnnnnnnnnnnnnnnnnnnnnnnnnnnnnnnnnnnnnnnnnnnnnnnnnnnnnnnnnnnnnnnnnnnnnnnnnnnnnnnnnnnnnnnnnnnnnnnnnnnnnnnnnnnnnnnnnnnnnnnnnnnnnnnnnnnnnnnnnnnnnnnnnnnnnnnnnnnnnnnnnnnnnnnnnnnnnnnnnnnnnnnnnnnnnnnnnnnnnnnnnnnnnnnnnnnnnnnnnnnnnnnnnnnnnnnnnnnnnnnnnnnnnnnnnnnnnnnnnnnnnnnnnnnnnnnnnnnnnnnnnnnnnnnnnnnnnnnnnnnnnnnnnnnnnnnnnnnnnnnnnnnnnnnnnnnnnnnnnnnnnnnnnnnnnnnnnnnnnnnnnnnnnnnnnnnnnnnnnnnnnnnnnnnnnnnnnnnnnnnnnnnnnnnnnnnnnnnnnnnnnnnnnnnnnnnnnnnnnnnnnnnnnnnnnnnnnnnnnnnnnnnnnnnnnnnnnnnnnnnnnnnnnnnnnnnnnnnnnnnnnnnnnnnnnnnnnnnnnnnnnnnnnnnnnnnnnnnnnnnnnnnnnnnnnnnnnnnnnnnnnnnnnnnnnnnnnnnnnnnnnnnnnnnnnnnnnnnnnnnnnnnnnnnnnnnnnnnnnnnnnnnnnnnnnnnnnnnnnnnnnnnnnnnnnnnnnnnnnnnnnnnnnnnnnnnnnnnnnnnnnnnnnnnnnnnnnnnnnnnnnnnnnnnnnnnnnnnnnnnnnnnnnnnnnnnnnnnnnnnnnnnnnnnnnnnnnnnnnnnnnnnnnnnnnnnnnnnnnnnnnnnnnnnnnnnnnnnnnnnnnnnnnnnnnnnnnnnnnnnnnnnnnnnnnnnnnnnnnnnnnnnnnnnnnnnnnnnnnnnnnnnnnnnnnnnnnnnnnnnnnnnnnnnnnnnnnnnnnnnnnnnnnnnnnnnnnnnnnnnnnnnnnnnnnnnnnnnnnnnnnnnnnnnnnnnnnnnnnnnnnnnnnnnnnnnnnnnnnnnnnnnnnnnnnnnnnnnnnnnnnnnnnnnnnnnnnnnnnnnnnnnnnnnnnnnnnnnnnnnnnnnnnnnnnnnnnnnnnnnnnnnnnnnnnnnnnnnnnnnnnnnnnnnnnnnnnnnnnnnnnnnnnnnnnnnnnnnnnnnnnnnnnnnnnnnnnnnnnnnnnnnnnnnnnnnnnnnnnnnnnnnnnnnnnnnnnnnnnnnnnnnnnnnnnnnnnnnnnnnnnnnnnnnnnnnnnnnnnnnnnnnnnnnnnnnnnnnnnnnnnnnnnnnnnnnnnnnnnnnnnnnnnnnnnnnnnnnnnnnnnnnnnnnnnnnnnnnnnnnnnnnnnnnnnnnnnnnnnnnnnnnnnnnnnnnnnnnnnnnnnnnnnnnnnnnnnnnnnnnnnnnnnnnnnnnnnnnnnnnnnnnnnnnnnnnnnnnnnnnnnnnnnnnnnnnnnnnnnnnnnnnnnnnnnnnnnnnnnnnnnnnnnnnnnnnnnnnnnnnnnnnnnnnnnnnnnnnnnnnnnnnnnnnnnnnnnnnnnnnnnnnnnnnnnnnnnnnnnnnnnnnnnnnnnnnnnnnnnnnnnnnnnnnnnnnnnnnnnnnnnnnnnnnnnnnnnnnnnnnnnnnnnnnnnnnnnnnnnnnnnnnnnnnnnnnnnnnnnnnnnnnnnnnnnnnnnnnnnnnnnnnnnnnnnnnnnnnnnnnnnnnnnnnnnnnnnnnnnnnnnnnnnnnnnnnnnnnnnnnnnnnnnnnnnnnnnnnnnnnnnnnnnnnnnnnnnnnnnnnnnnnnnnnnnnnnnnnnnnnnnnnnnnnnnnnnnnnnnnnnnnnnnnnnnnnnnnnnnnnnnnnnnnnnnnnnnnnnnnnnnnnnnnnnnnnnnnnnnnnnnnnnnnnnnnnnnnnnnnnnnnnnnnnnnnnnnnnnnnnnnnnnnnnnnnnnnnnnnnnnnnnnnnnnnnnnnnnnnnnnnnnnnnnnnnnnnnnnnnnnnnnnnnnnnnnnnnnnnnnnnnnnnnnnnnnnnnnnnnnnnnnnnnnnnnnnnnnnnnnnnnnnnnnnnnnnnnnnnnnnnnnnnnnnnnnnnnnnnnnnnnnnnnnnnnnnnnnnnnnnnnnnnnnnnnnnnnnnnnnnnnnnnnnnnnnnnnnnnnnnnnnnnnnnnnnnnnnnnnnnnnnnnnnnnnnnnnnnnnnnnnnnnnnnnnnnnnnnnnnnnnnnnnnnnnnnnnnnnnnnnnnnnnnnnnnnnnnnnnnnnnnnnnnnnnnnnnnnnnnnnnnnnnnnnnnnnnnnnnnnnnnnnnnnnnnnnnnnnnnnnnnnnnnnnnnnnnnnnnnnnnnnnnnnnnnnnnnnnnnnnnnnnnnnnnnnnnnnnnnnnnnnnnnnnnnnnnnnnnnnnnnnnnnnnnnnnnnnnnnnnnnnnnnnnnnnnnnnnnnnnnnnnnnnnnnnnnnnnnnnnnnnnnnnnnnnnnnnnnnnnnnnnnnnnnnnnnnnnnnnnnnnnnnnnnnnnnnnnnnnnnnnnnnnnnnnnnnnnnnnnnnnnnnnnnnnnnnnnnnnnnnnnnnnnnnnnnnnnnnnnnnnnnnnnnnnnnnnnnnnnnnnnnnnnnnnnnnnnnnnnnnnnnnnnnnnnnnnnnnnnnnnnnnnnnnnnnnnnnnnnnnnnnnnnnnnnnnnnnnnnnnnnnnnnnnnnnnnnnnnnnnnnnnnnnnnnnnnnnnnnnnnnnnnnnnnnnnnnnnnnnnnnnnnnnnnnnnnnnnnnnnnnnnnnnnnnnnnnnnnnnnnnnnnnnnnnnnnnnnnnnnnnnnnnnnnnnnnnnnnnnnnnnnnnnnnnnnnnnnnnnnnnnnnnnnnnnnnnnnnnnnnnnnnnnnnnnnnnnnnnnnnnnnnnnnnnnnnnnnnnnnnnnnnnnnnnnnnnnnnnnnnnnnnnnnnnnnnnnnnnnnnnnnnnnnnnnnnnnnnnnnnnnnnnnnnnnnnnnnnnnnnnnnnnnnnnnnnnnnnnnnnnnnnnnnnnnnnnnnnnnnnnnnnnnnnnnnnnnnnnnnnnnnnnnnnnnnnnnnnnnnnnnnnnnnnnnnnnnnnnnnnnnnnnnnnnnnnnnnnnnnnnnnnnnnnnnnnnnnnnnnnnnnnnnnnnnnnnnnnnnnnnnnnnnnnnnnnnnnnnnnnnnnnnnnnnnnnnnnnnnnnnnnnnnnnnnnnnnnnnnnnnnnnnnnnnnnnnnnnnnnnnnnnnnnnnnnnnnnnnnnnnnnnnnnnnnnnnnnnnnnnnnnnnnnnnnnnnnnnnnnnnnnnnnnnnnnnnnnnnnnnnnnnnnnnnnnnnnnnnnnnnnnnnnnnnnnnnnnnnnnnnnnnnnnnnnnnnnnnnnnnnnnnnnnnnnnnnnnnnnnnnnnnnnnnnnnnnnnnnnnnnnnnnnnnnnnnnnnnnnnnnnnnnnnnnnnnnnnnnnnnnnnnnnnnnnnnnnnnnnnnnnnnnnnnnnnnnnnnnnnnnnnnnnnnnnnnnnnnnnnnnnnnnnnnnnnnnnnnnnnnnnnnnnnnnnnnnnnnnnnnnnnnnnnnnnnnnnnnnnnnnnnnnnnnnnnnnnnnnnnnnnnnnnnnnnnnnnnnnnnnnnnnnnnnnnnnnnnnnnnnnnnnnnnnnnnnnnnnnnnnnnnnnnnnnnnnnnnnnnnnnnnnnnnnnnnnnnnnnnnnnnnnnnnnnnnnnnnnnnnnnnnnnnnnnnnnnnnnnnnnnnnnnnnnnnnnnnnnnnnnnnnnnnnnnnnnnnnnnnnnnnnnnnnnnnnnnnnnnnnnnnnnnnnnnnnnnnnnnnnnnnnnnnnnnnnnnnnnnnnnnnnnnnnnnnnnnnnnnnnnnnnnnnnnnnnnnnnnnnnnnnnnnnnnnnnnnnnnnnnnnnnnnnnnnnnnnnnnnnnnnnnnnnnnnnnnnnnnnnnnnnnnnnnnnnnnnnnnnnnnnnnnnnnnnnnnnnnnnnnnnnnnnnnnnnnnnnnnnnnnnnnnnnnnnnnnnnnnnnnnnnnnnnnnnnnnnnnnnnnnnnnnnnnnnnnnnnnnnnnnnnnnnnnnnnnnnnnnnnnnnnnnnnnnnnnnnnnnnnnnnnnnnnnnnnnnnnnnnnnnnnnnnnnnnnnnnnnnnnnnnnnnnnnnnnnnnnnnnnnnnnnnnnnnnnnnnnnnnnnnnnnnnnnnnnnnnnnnnnnnnnnnnnnnnnnnnnnnnnnnnnnnnnnnnnnnnnnnnnnnnnnnnnnnnnnnnnnnnnnnnnnnnnnnnnnnnnnnnnnnnnnnnnnnnnnnnnnnnnnnnnnnnnnnnnnnnnnnnnnnnnnnnnnnnnnnnnnnnnnnnnnnnnnnnnnnnnnnnnnnnnnnnnnnnnnnnnnnnnnnnnnnnnnnnnnnnnnnnnnnnnnnnnnnnnnnnnnnnnnnnnnnnnnnnnnnnnnnnnnnnnnnnnnnnnnnnnnnnnnnnnnnnnnnnnnnnnnnnnnnnnnnnnnnnnnnnnnnnnnnnnnnnnnnnnnnnnnnnnnnnnnnnnnnnnnnnnnnnnnnnnnnnnnnnnnnnnnnnnnnnnnnnnnnnnnnnnnnnnnnnnnnnnnnnnnnnnnnnnnnnnnnnnnnnnnnnnnnnnnnnnnnnnnnnnnnnnnnnnnnnnnnnnnnnnnnnnnnnnnnnnnnnnnnnnnnnnnnnnnnnnnnnnnnnnnnnnnnnnnnnnnnnnnnnnnnnnnnnnnnnnnnnnnnnnnnnnnnnnnnnnnnnnnnnnnnnnnnnnnnnnnnnnnnnnnnnnnnnnnnnnnnnnnnnnnnnnnnnnnnnnnnnnnnnnnnnnnnnnnnnnnnnnnnnnnnnnnnnnnnnnnnnnnnnnnnnnnnnnnnnnnnnnnnnnnnnnnnnnnnnnnnnnnnnnnnnnnnnnnnnnnnnnnnnnnnnnnnnnnnnnnnnnnnnnnnnnnnnnnnnnnnnnnnnnnnnnnnnnnnnnnnnnnnnnnnnnnnnnnnnnnnnnnnnnnnnnnnnnnnnnnnnnnnnnnnnnnnnnnnnnnnnnnnnnnnnnnnnnnnnnnnnnnnnnnnnnnnnnnnnnnnnnnnnnnnnnnnnnnnnnnnnnnnnnnnnnnnnnnnnnnnnnnnnnnnnnnnnnnnnnnnnnnnnnnnnnnnnnnnnnnnnnnnnnnnnnnnnnnnnnnnnnnnnnnnnnnnnnnnnnnnnnnnnnnnnnnnnnnnnnnnnnnnnnnnnnnnnnnnnnnnnnnnnnnnnnnnnnnnnnnnnnnnnnnnnnnnnnnnnnnnnnnnnnnnnnnnnnnnnnnnnnnnnnnnnnnnnnnnnnnnnnnnnnnnnnnnnnnnnnnnnnnnnnnnnnnnnnnnnnnnnnnnnnnnnnnnnnnnnnnnnnnnnnnnnnnnnnnnnnnnnnnnnnnnnnnnnnnnnnnnnnnnnnnnnnnnnnnnnnnnnnnnnnnnnnnnnnnnnnnnnnnnnnnnnnnnnnnnnnnnnnnnnnnnnnnnnnnnnnnnnnnnnnnnnnnnnnnnnnnnnnnnnnnnnnnnnnnnnnnnnnnnnnnnnnnnnnnnnnnnnnnnnnnnnnnnnnnnnnnnnnnnnnnnnnnnnnnnnnnnnnnnnnnnnnnnnnnnnnnnnnnnnnnnnnnnnnnnnnnnnnnnnnnnnnnnnnnnnnnnnnnnnnnnnnnnnnnnnnnnnnnnnnnnnnnnnnnnnnnnnnnnnnnnnnnnnnnnnnnnnnnnnnnnnnnnnnnnnnnnnnnnnnnnnnnnnnnnnnnnnnnnnnnnnnnnnnnnnnnnnnnnnnnnnnnnnnnnnnnnnnnnnnnnnnnnnnnnnnnnnnnnnnnnnnnnnnnnnnnnnnnnnnnnnnnnnnnnnnnnnnnnnnnnnnnnnnnnnnnnnnnnnnnnnnnnnnnnnnnnnnnnnnnnnnnnnnnnnnnnnnnnnnnnnnnnnnnnnnnnnnnnnnnnnnnnnnnnnnnnnnnnnnnnnnnnnnnnnnnnnnnnnnnnnnnnnnnnnnnnnnnnnnnnnnnnnnnnnnnnnnnnnnnnnnnnnnnnnnnnnnnnnnnnnnnnnnnnnnnnnnnnnnnnnnnnnnnnnnnnnnnnnnnnnnnnnnnnnnnnnnnnnnnnnnnnnnnnnnnnnnnnnnnnnnnnnnnnnnnnnnnnnnnnnnnnnnnnnnnnnnnnnnnnnnnnnnnnnnnnnnnnnnnnnnnnnnnnnnnnnnnnnnnnnnnnnnnnnnnnnnnnnnnnnnnnnnnnnnnnnnnnnnnnnnnnnnnnnnnnnnnnnnnnnnnnnnnnnnnnnnnnnnnnnnnnnnnnnnnnnnnnnnnnnnnnnnnnnnnnnnnnnnnnnnnnnnnnnnnnnnnnnnnnnnnnnnnnnnnnnnnnnnnnnnnnnnnnnnnnnnnnnnnnnnnnnnnnnnnnnnnnnnnnnnnnnnnnnnnnnnnnnnnnnnnnnnnnnnnnnnnnnnnnnnnnnnnnnnnnnnnnnnnnnnnnnnnnnnnnnnnnnnnnnnnnnnnnnnnnnnnnnnnnnnnnnnnnnnnnnnnnnnnnnnnnnnnnnnnnnnnnnnnnnnnnnnnnnnnnnnnnnnnnnnnnnnnnnnnnnnnnnnnnnnnnnnnnnnnnnnnnnnnnnnnnnnnnnnnnnnnnnnnnnnnnnnnnnnnnnnnnnnnnnnnnnnnnnnnnnnnnnnnnnnnnnnnnnnnnnnnnnnnnnnnnnnnnnnnnnnnnnnnnnnnnnnnnnnnnnnnnnnnnnnnnnnnnnnnnnnnnnnnnnnnnnnnnnnnnnnnnnnnnnnnnnnnnnnnnnnnnnnnnnnnnnnnnnnnnnnnnnnnnnnnnnnnnnnnnnnnnnnnnnnnnnnnnnnnnnnnnnnnnnnnnnnnnnnnnnnnnnnnnnnnnnnnnnnnnnnnnnnnnnnnnnnnnnnnnnnnnnnnnnnnnnnnnnnnnnnnnnnnnnnnnnnnnnnnnnnnnnnnnnnnnnnnnnnnnnnnnnnnnnnnnnnnnnnnnnnnnnnnnnnnnnnnnnnnnnnnnnnnnnnnnnnnnnnnnnnnnnnnnnnnnnnnnnnnnnnnnnnnnnnnnnnnnnnnnnnnnnnnnnnnnnnnnnnnnnnnnnnnnnnnnnnnnnnnnnnnnnnnnnnnnnnnnnnnnnnnnnnnnnnnnnnnnnnnnnnnnnnnnnnnnnnnnnnnnnnnnnnnnnnnnnnnnnnnnnnnnnnnnnnnnnnnnnnnnnnnnnnnnnnnnnnnnnnnnnnnnnnnnnnnnnnnnnnnnnnnnnnnnnnnnnnnnnnnnnnnnnnnnnnnnnnnnnnnnnnnnnnnnnnnnnnnnnnnnnnnnnnnnnnnnnnnnnnnnnnnnnnnnnnnnnnnnnnnnnnnnnnnnnnnnnnnnnnnnnnnnnnnnnnnnnnnnnnnnnnnnnnnnnnnnnnnnnnnnnnnnnnnnnnnnnnnnnnnnnnnnnnnnnnnnnnnnnnnnnnnnnnnnnnnnnnnnnnnnnnnnnnnnnnnnnnnnnnnnnnnnnnnnnnnnnnnnnnnnnnnnnnnnnnnnnnnnnnnnnnnnnnnnnnnnnnnnnnnnnnnnnnnnnnnnnnnnnnnnnnnnnnnnnnnnnnnnnnnnnnnnnnnnnnnnnnnnnnnnnnnnnnnnnnnnnnnnnnnnnnnnnnnnnnnnnnnnnnnnnnnnnnnnnnnnnnnnnnnnnnnnnnnnnnnnnnnnnnnnnnnnnnnnnnnnnnnnnnnnnnnnnnnnnnnnnnnnnnnnnnnnnnnnnnnnnnnnnnnnnnnnnnnnnnnnnnnnnnnnnnnnnnnnnnnnnnnnnnnnnnnnnnnnnnnnnnnnnnnnnnnnnnnnnnnnnnnnnnnnnnnnnnnnnnnnnnnnnnnnnnnnnnnnnnnnnnnnnnnnnnnnnnnnnnnnnnnnnnnnnnnnnnnnnnnnnnnnnnnnnnnnnnnnnnnnnnnnnnnnnnnnnnnnnnnnnnnnnnnnnnnnnnnnnnnnnnnnnnnnnnnnnnnnnnnnnnnnnnnnnnnnnnnnnnnnnnnnnnnnnnnnnnnnnnnnnnnnnnnnnnnnnnnnnnnnnnnnnnnnnnnnnnnnnnnnnnnnnnnnnnnnnnnnnnnnnnnnnnnnnnnnnnnnnnnnnnnnnnnnnnnnnnnnnnnnnnnnnnnnnnnnnnnnnnnnnnnnnnnnnnnnnnnnnnnnnnnnnnnnnnnnnnnnnnnnnnnnnnnnnnnnnnnnnnnnnnnnnnnnnnnnnnnnnnnnnnnnnnnnnnnnnnnnnnnnnnnnnnnnnnnnnnnnnnnnnnnnnnnnnnnnnnnnnnnnnnnnnnnnnnnnnnnnnnnnnnnnnnnnnnnnnnnnnnnnnnnnnnnnnnnnnnnnnnnnnnnnnnnnnnnnnnnnnnnnnnnnnnnnnnnnnnnnnnnnnnnnnnnnnnnnnnnnnnnnnnnnnnnnnnnnnnnnnnnnnnnnnnnnnnnnnnnnnnnnnnnnnnnnnnnnnnnnnnnnnnnnnnnnnnnnnnnnnnnnnnnnnnnnnnnnnnnnnnnnnnnnnnnnnnnnnnnnnnnnnnnnnnnnnnnnnnnnnnnnnnnnnnnnnnnnnnnnnnnnnnnnnnnnnnnnnnnnnnnnnnnnnnnnnnnnnnnnnnnnnnnnnnnnnnnnnnnnnnnnnnnnnnnnnnnnnnnnnnnnnnnnnnnnnnnnnnnnnnnnnnnnnnnnnnnnnnnnnnnnnnnnnnnnnnnnnnnnnnnnnnnnnnnnnnnnnnnnnnnnnnnnnnnnnnnnnnnnnnnnnnnnnnnnnnnnnnnnnnnnnnnnnnnnnnnnnnnnnnnnnnnnnnnnnnnnnnnnnnnnnnnnnnnnnnnnnnnnnnnnnnnnnnnnnnnnnnnnnnnnnnnnnnnnnnnnnnnnnnnnnnnnnnnnnnnnnnnnnnnnnnnnnnnnnnnnnnnnnnnnnnnnnnnnnnnnnnnnnnnnnnnnnnnnnnnnnnnnnnnnnnnnnnnnnnnnnnnnnnnnnnnnnnnnnnnnnnnnnnnnnnnnnnnnnnnnnnnnnnnnnnnnnnnnnnnnnnnnnnnnnnnnnnnnnnnnnnnnnnnnnnnnnnnnnnnnnnnnnnnnnnnnnnnnnnnnnnnnnnnnnnnnnnnnnnnnnnnnnnnnnnnnnnnnnnnnnnnnnnnnnnnnnnnnnnnnnnnnnnnnnnnnnnnnnnnnnnnnnnnnnnnnnnnnnnnnnnnnnnnnnnnnnnnnnnnnnnnnnnnnnnnnnnnnnnnnnnnnnnnnnnnnnnnnnnnnnnnnnnnnnnnnnnnnnnnnnnnnnnnnnnnnnnnnnnnnnnnnnnnnnnnnnnnnnnnnnnnnnnnnnnnnnnnnnnnnnnnnnnnnnnnnnnnnnnnnnnnnnnnnnnnnnnnnnnnnnnnnnnnnnnnnnnnnnnnnnnnnnnnnnnnnnnnnnnnnnnnnnnnnnnnnnnnnnnnnnnnnnnnnnnnnnnnnnnnnnnnnnnnnnnnnnnnnnnnnnnnnnnnnnnnnnnnnnnnnnnnnnnnnnnnnnnnnnnnnnnnnnnnnnnnnnnnnnnnnnnnnnnnnnnnnnnnnnnnnnnnnnnnnnnnnnnnnnnnnnnnnnnnnnnnnnnnnnnnnnnnnnnnnnnnnnnnnnnnnnnnnnnnnnnnnnnnnnnnnnnnnnnnnnnnnnnnnnnnnnnnnnnnnnnnnnnnnnnnnnnnnnnnnnnnnnnnnnnnnnnnnnnnnnnnnnnnnnnnnnnnnnnnnnnnnnnnnnnnnnnnnnnnnnnnnnnnnnnnnnnnnnnnnnnnnnnnnnnnnnnnnnnnnnnnnnnnnnnnnnnnnnnnnnnnnnnnnnnnnnnnnnnnnnnnnnnnnnnnnnnnnnnnnnnnnnnnnnnnnnnnnnnnnnnnnnnnnnnnnnnnnnnnnnnnnnnnnnnnnnnnnnnnnnnnnnnnnnnnnnnnnnnnnnnnnnnnnnnnnnnnnnnnnnnnnnnnnnnnnnnnnnnnnnnnnnnnnnnnnnnnnnnnnnnnnnnnnnnnnnnnnnnnnnnnnnnnnnnnnnnnnnnnnnnnnnnnnnnnnnnnnnnnnnnnnnnnnnnnnnnnnnnnnnnnnnnnnnnnnnnnnnnnnnnnnnnnnnnnnnnnnnnnnnnnnnnnnnnnnnnnnnnnnnnnnnnnnnnnnnnnnnnnnnnnnnnnnnnnnnnnnnnnnnnnnnnnnnnnnnnnnnnnnnnnnnnnnnnnnnnnnnnnnnnnnnnnnnnnnnnnnnnnnnnnnnnnnnnnnnnnnnnnnnnnnnnnnnnnnnnnnnnnnnnnnnnnnnnnnnnnnnnnnnnnnnnnnnnnnnnnnnnnnnnnnnnnnnnnnnnnnnnnnnnnnnnnnnnnnnnnnnnnnnnnnnnnnnnnnnnnnnnnnnnnnnnnnnnnnnnnnnnnnnnnnnnnnnnnnnnnnnnnnnnnnnnnnnnnnnnnnnnnnnnnnnnnnnnnnnnnnnnnnnnnnnnnnnnnnnnnnnnnnnnnnnnnnnnnnnnnnnnnnnnnnnnnnnnnnnnnnnnnnnnnnnnnnnnnnnnnnnnnnnnnnnnnnnnnnnnnnnnnnnnnnnnnnnnnnnnnnnnnnnnnnnnnnnnnnnnnnnnnnnnnnnnnnnnnnnnnnnnnnnnnnnnnnnnnnnnnnnnnnnnnnnnnnnnnnnnnnnnnnnnnnnnnnnnnnnnnnnnnnnnnnnnnnnnnnnnnnnnnnnnnnnnnnnnnnnnnnnnnnnnnnnnnnnnnnnnnnnnnnnnnnnnnnnnnnnnnnnnnnnnnnnnnnnnnnnnnnnnnnnnnnnnnnnnnnnnnnnnnnnnnnnnnnnnnnnnnnnnnnnnnnnnnnnnnnnnnnnnnnnnnnnnnnnnnnnnnnnnnnnnnnnnnnnnnnnnnnnnnnnnnnnnnnnnnnnnnnnnnnnnnnnnnnnnnnnnnnnnnnnnnnnnnnnnnnnnnnnnnnnnnnnnnnnnnnnnnnnnnnnnnnnnnnnnnnnnnnnnnnnnnnnnnnnnnnnnnnnnnnnnnnnnnnnnnnnnnnnnnnnnnnnnnnnnnnnnnnnnnnnnnnnnnnnnnnnnnnnnnnnnnnnnnnnnnnnnnnnnnnnnnnnnnnnnnnnnnnnnnnnnnnnnnnnnnnnnnnnnnnnnnnnnnnnnnnnnnnnnnnnnnnnnnnnnnnnnnnnnnnnnnnnnnnnnnnnnnnnnnnnnnnnnnnnnnnnnnnnnnnnnnnnnnnnnnnnnnnnnnnnnnnnnnnnnnnnnnnnnnnnnnnnnnnnnnnnnnnnnnnnnnnnnnnnnnnnnnnnnnnnnnnnnnnnnnnnnnnnnnnnnnnnnnnnnnnnnnnnnnnnnnnnnnnnnnnnnnnnnnnnnnnnnnnnnnnnnnnnnnnnnnnnnnnnnnnnnnnnnnnnnnnnnnnnnnnnnnnnnnnnnnnnnnnnnnnnnnnnnnnnnnnnnnnnnnnnnnnnnnnnnnnnnnnnnnnnnnnnnnnnnnnnnnnnnnnnnnnnnnnnnnnnnnnnnnnnnnnnnnnnnnnnnnnnnnnnnnnnnnnnnnnnnnnnnnnnnnnnnnnnnnnnnnnnnnnnnnnnnnnnnnnnnnnnnnnnnnnnnnnnnnnnnnnnnnnnnnnnnnnnnnnnnnnnnnnnnnnnnnnnnnnnnnnnnnnnnnnnnnnnnnnnnnnnnnnnnnnnnnnnnnnnnnnnnnnnnnnnnnnnnnnnnnnnnnnnnnnnnnnnnnnnnnnnnnnnnnnnnnnnnnnnnnnnnnnnnnnnnnnnnnnnnnnnnnnnnnnnnnnnnnnnnnnnnnnnnnnnnnnnnnnnnnnnnnnnnnnnnnnnnnnnnnnnnnnnnnnnnnnnnnnnnnnnnnnnnnnnnnnnnnnnnnnnnnnnnnnnnnnnnnnnnnnnnnnnnnnnnnnnnnnnnnnnnnnnnnnnnnnnnnnnnnnnnnnnnnnnnnnnnnnnnnnnnnnnnnnnnnnnnnnnnnnnnnnnnnnnnnnnnnnnnnnnnnnnnnnnnnnnnnnnnnnnnnnnnnnnnnnnnnnnnnnnnnnnnnnnnnnnnnnnnnnnnnnnnnnnnnnnnnnnnnnnnnnnnnnnnnnnnnnnnnnnnnnnnnnnnnnnnnnnnnnnnnnnnnnnnnnnnnnnnnnnnnnnnnnnnnnnnnnnnnnnnnnnnnnnnnnnnnnnnnnnnnnnnnnnnnnnnnnnnnnnnnnnnnnnnnnnnnnnnnnnnnnnnnnnnnnnnnnnnnnnnnnnnnnnnnnnnnnnnnnnnnnnnnnnnnnnnnnnnnnnnnnnnnnnnnnnnnnnnnnnnnnnnnnnnnnnnnnnnnnnnnnnnnnnnnnnnnnnnnnnnnnnnnnnnnnnnnnnnnnnnnnnnnnnnnnnnnnnnnnnnnnnnnnnnnnnnnnnnnnnnnnnnnnnnnnnnnnnnnnnnnnnnnnnnnnnnnnnnnnnnnnnnnnnnnnnnnnnnnnnnnnnnnnnnnnnnnnnnnnnnnnnnnnnnnnnnnnnnnnnnnnnnnnnnnnnnnnnnnnnnnnnnnnnnnnnnnnnnnnnnnnnnnnnnnnnnnnnnnnnnnnnnnnnnnnnnnnnnnnnnnnnnnnnnnnnnnnnnnnnnnnnnnnnnnnnnnnnnnnnnnnnnnnnnnnnnnnnnnnnnnnnnnnnnnnnnnnnnnnnnnnnnnnnnnnnnnnnnnnnnnnnnnnnnnnnnnnnnnnnnnnnnnnnnnnnnnnnnnnnnnnnnnnnnnnnnnnnnnnnnnnnnnnnnnnnnnnnnnnnnnnnnnnnnnnnnnnnnnnnnnnnnnnnnnnnnnnnnnnnnnnnnnnnnnnnnnnnnnnnnnnnnnnnnnnnnnnnnnnnnnnnnnnnnnnnnnnnnnnnnnnnnnnnnnnnnnnnnnnnnnnnnnnnnnnnnnnnnnnnnnnnnnnnnnnnnnnnnnnnnnnnnnnnnnnnnnnnnnnnnnnnnnnnnnnnnnnnnnnnnnnnnnnnnnnnnnnnnnnnnnnnnnnnnnnnnnnnnnnnnnnnnnnnnnnnnnnnnnnnnnnnnnnnnnnnnnnnnnnnnnnnnnnnnnnnnnnnnnnnnnnnnnnnnnnnnnnnnnnnnnnnnnnnnnnnnnnnnnnnnnnnnnnnnnnnnnnnnnnnnnnnnnnnnnnnnnnnnnnnnnnnnnnnnnnnnnnnnnnnnnnnnnnnnnnnnnnnnnnnnnnnnnnnnnnnnnnnnnnnnnnnnnnnnnnnnnnnnnnnnnnnnnnnnnnnnnnnnnnnnnnnnnnnnnnnnnnnnnnnnnnnnnnnnnnnnnnnnnnnnnnnnnnnnnnnnnnnnnnnnnnnnnnnnnnnnnnnnnnnnnnnnnnnnnnnnnnnnnnnnnnnnnnnnnnnnnnnnnnnnnnnnnnnnnnnnnnnnnnnnnnnnnnnnnnnnnnnnnnnnnnnnnnnnnnnnnnnnnnnnnnnnnnnnnnnnnnnnnnnnnnnnnnnnnnnnnnnnnnnnnnnnnnnnnnnnnnnnnnnnnnnnnnnnnnnnnnnnnnnnnnnnnnnnnnnnnnnnnnnnnnnnnnnnnnnnnnnnnnnnnnnnnnnnnnnnnnnnnnnnnnnnnnnnnnnnnnnnnnnnnnnnnnnnnnnnnnnnnnnnnnnnnnnnnnnnnnnnnnnnnnnnnnnnnnnnnnnnnnnnnnnnnnnnnnnnnnnnnnnnnnnnnnnnnnnnnnnnnnnnnnnnnnnnnnnnnnnnnnnnnnnnnnnnnnnnnnnnnnnnnnnnnnnnnnnnnnnnnnnnnnnnnnnnnnnnnnnnnnnnnnnnnnnnnnnnnnnnnnnnnnnnnnnnnnnnnnnnnnnnnnnnnnnnnnnnnnnnnnnnnnnnnnnnnnnnnnnnnnnnnnnnnnnnnnnnnnnnnnnnnnnnnnnnnnnnnnnnnnnnnnnnnnnnnnnnnnnnnnnnnnnnnnnnnnnnnnnnnnnnnnnnnnnnnnnnnnnnnnnnnnnnnnnnnnnnnnnnnnnnnnnnnnnnnnnnnnnnnnnnnnnnnnnnnnnnnnnnnnnnnnnnnnnnnnnnnnnnnnnnnnnnnnnnnnnnnnnnnnnnnnnnnnnnnnnnnnnnnnnnnnnnnnnnnnnnnnnnnnnnnnnnnnnnnnnnnnnnnnnnnnnnnnnnnnnnnnnnnnnnnnnnnnnnnnnnnnnnnnnnnnnnnnnnnnnnnnnnnnnnnnnnnnnnnnnnnnnnnnnnnnnnnnnnnnnnnnnnnnnnnnnnnnnnnnnnnnnnnnnnnnnnnnnnnnnnnnnnnnnnnnnnnnnnnnnnnnnnnnnnnnnnnnnnnnnnnnnnnnnnnnnnnnnnnnnnnnnnnnnnnnnnnnnnnnnnnnnnnnnnnnnnnnnnnnnnnnnnnnnnnnnnnnnnnnnnnnnnnnnnnnnnnnnnnnnnnnnnnnnnnnnnnnnnnnnnnnnnnnnnnnnnnnnnnnnnnnnnnnnnnnnnnnnnnnnnnnnnnnnnnnnnnnnnnnnnnnnnnnnnnnnnnnnnnnnnnnnnnnnnnnnnnnnnnnnnnnnnnnnnnnnnnnnnnnnnnnnnnnnnnnnnnnnnnnnnnnnnnnnnnnnnnnnnnnnnnnnnnnnnnnnnnnnnnnnnnnnnnnnnnnnnnnnnnnnnnnnnnnnnnnnnnnnnnnnnnnnnnnnnnnnnnnnnnnnnnnnnnnnnnnnnnnnnnnnnnnnnnnnnnnnnnnnnnnnnnnnnnnnnnnnnnnnnnnnnnnnnnnnnnnnnnnnnnnnnnnnnnnnnnnnnnnnnnnnnnnnnnnnnnnnnnnnnnnnnnnnnnnnnnnnnnnnnnnnnnnnnnnnnnnnnnnnnnnnnnnnnnnnnnnnnnnnnnnnnnnnnnnnnnnnnnnnnnnnnnnnnnnnnnnnnnnnnnnnnnnnnnnnnnnnnnnnnnnnnnnnnnnnnnnnnnnnnnnnnnnnnnnnnnnnnnnnnnnnnnnnnnnnnnnnnnnnnnnnnnnnnnnnnnnnnnnnnnnnnnnnnnnnnnnnnnnnnnnnnnnnnnnnnnnnnnnnnnnnnnnnnnnnnnnnnnnnnnnnnnnnnnnnnnnnnnnnnnnnnnnnnnnnnnnnnnnnnnnnnnnnnnnnnnnnnnnnnnnnnnnnnnnnnnnnnnnnnnnnnnnnnnnnnnnnnnnnnnnnnnnnnnnnnnnnnnnnnnnnnnnnnnnnnnnnnnnnnnnnnnnnnnnnnnnnnnnnnnnnnnnnnnnnnnnnnnnnnnnnnnnnnnnnnnnnnnnnnnnnnnnnnnnnnnnnnnnnnnnnnnnnnnnnnnnnnnnnnnnnnnnnnnnnnnnnnnnnnnnnnnnnnnnnnnnnnnnnnnnnnnnnnnnnnnnnnnnnnnnnnnnnnnnnnnnnnnnnnnnnnnnnnnnnnnnnnnnnnnnnnnnnnnnnnnnnnnnnnnnnnnnnnnnnnnnnnnnnnnnnnnnnnnnnnnnnnnnnnnnnnnnnnnnnnnnnnnnnnnnnnnnnnnnnnnnnnnnnnnnnnnnnnnnnnnnnnnnnnnnnnnnnnnnnnnnnnnnnnnnnnnnnnnnnnnnnnnnnnnnnnnnnnnnnnnnnnnnnnnnnnnnnnnnnnnnnnnnnnnnnnnnnnnnnnnnnnnnnnnnnnnnnnnnnnnnnnnnnnnnnnnnnnnnnnnnnnnnnnnnnnnnnnnnnnnnnnnnnnnnnnnnnnnnnnnnnnnnnnnnnnnnnnnnnnnnnnnnnnnnnnnnnnnnnnnnnnnnnnnnnnnnnnnnnnnnnnnnnnnnnnnnnnnnnnnnnnnnnnnnnnnnnnnnnnnnnnnnnnnnnnnnnnnnnnnnnnnnnnnnnnnnnnnnnnnnnnnnnnnnnnnnnnnnnnnnnnnnnnnnnnnnnnnnnnnnnnnnnnnnnnnnnnnnnnnnnnnnnnnnnnnnnnnnnnnnnnnnnnnnnnnnnnnnnnnnnnnnnnnnnnnnnnnnnnnnnnnnnnnnnnnnnnnnnnnnnnnnnnnnnnnnnnnnnnnnnnnnnnnnnnnnnnnnnnnnnnnnnnnnnnnnnnnnnnnnnnnnnnnnnnnnnnnnnnnnnnnnnnnnnnnnnnnnnnnnnnnnnnnnnnnnnnnnnnnnnnnnnnnnnnnnnnnnnnnnnnnnnnnnnnnnnnnnnnnnnnnnnnnnnnnnnnnnnnnnnnnnnnnnnnnnnnnnnnnnnnnnnnnnnnnnnnnnnnnnnnnnnnnnnnnnnnnnnnnnnnnnnnnnnnnnnnnnnnnnnnnnnnnnnnnnnnnnnnnnnnnnnnnnnnnnnnnnnnnnnnnnnnnnnnnnnnnnnnnnnnnnnnnnnnnnnnnnnnnnnnnnnnnnnnnnnnnnnnnnnnnnnnnnnnnnnnnnnnnnnnnnnnnnnnnnnnnnnnnnnnnnnnnnnnnnnnnnnnnnnnnnnnnnnnnnnnnnnnnnnnnnnnnnnnnnnnnnnnnnnnnnnnnnnnnnnnnnnnnnnnnnnnnnnnnnnnnnnnnnnnnnnnnnnnnnnnnnnnnnnnnnnnnnnnnnnnnnnnnnnnnnnnnnnnnnnnnnnnnnnnnnnnnnnnnnnnnnnnnnnnnnnnnnnnnnnnnnnnnnnnnnnnnnnnnnnnnnnnnnnnnnnnnnnnnnnnnnnnnnnnnnnnnnnnnnnnnnnnnnnnnnnnnnnnnnnnnnnnnnnnnnnnnnnnnnnnnnnnnnnnnnnnnnnnnnnnnnnnnnnnnnnnnnnnnnnnnnnnnnnnnnnnnnnnnnnnnnnnnnnnnnnnnnnnnnnnnnnnnnnnnnnnnnnnnnnnnnnnnnnnnnnnnnnnnnnnnnnnnnnnnnnnnnnnnnnnnnnnnnnnnnnnnnnnnnnnnnnnnnnnnnnnnnnnnnnnnnnnnnnnnnnnnnnnnnnnnnnnnnnnnnnnnnnnnnnnnnnnnnnnnnnnnnnnnnnnnnnnnnnnnnnnnnnnnnnnnnnnnnnnnnnnnnnnnnnnnnnnnnnnnnnnnnnnnnnnnnnnnnnnnnnnnnnnnnnnnnnnnnnnnnnnnnnnnnnnnnnnnnnnnnnnnnnnnnnnnnnnnnnnnnnnnnnnnnnnnnnnnnnnnnnnnnnnnnnnnnnnnnnnnnnnnnnnnnnnnnnnnnnnnnnnnnnnnnnnnnnnnnnnnnnnnnnnnnnnnnnnnnnnnnnnnnnnnnnnnnnnnnnnnnnnnnnnnnnnnnnnnnnnnnnnnnnnnnnnnnnnnnnnnnnnnnnnnnnnnnnnnnnnnnnnnnnnnnnnnnnnnnnnnnnnnnnnnnnnnnnnnnnnnnnnnnnnnnnnnnnnnnnnnnnnnnnnnnnnnnnnnnnnnnnnnnnnnnnnnnnnnnnnnnnnnnnnnnnnnnnnnnnnnnnnnnnnnnnnnnnnnnnnnnnnnnnnnnnnnnnnnnnnnnnnnnnnnnnnnnnnnnnnnnnnnnnnnnnnnnnnnnnnnnnnnnnnnnnnnnnnnnnnnnnnnnnnnnnnnnnnnnnnnnnnnnnnnnnnnnnnnnnnnnnnnnnnnnnnnnnnnnnnnnnnnnnnnnnnnnnnnnnnnnnnnnnnnnnnnnnnnnnnnnnnnnnnnnnnnnnnnnnnnnnnnnnnnnnnnnnnnnnnnnnnnnnnnnnnnnnnnnnnnnnnnnnnnnnnnnnnnnnnnnnnnnnnnnnnnnnnnnnnnnnnnnnnnnnnnnnnnnnnnnnnnnnnnnnnnnnnnnnnnnnnnnnnnnnnnnnnnnnnnnnnnnnnnnnnnnnnnnnnnnnnnnnnnnnnnnnnnnnnnnnnnnnnnnnnnnnnnnnnnnnnnnnnnnnnnnnnnnnnnnnnnnnnnnnnnnnnnnnnnnnnnnnnnnnnnnnnnnnnnnnnnnnnnnnnnnnnnnnnnnnnnnnnnnnnnnnnnnnnnnnnnnnnnnnnnnnnnnnnnnnnnnnnnnnnnnnnnnnnnnnnnnnnnnnnnnnnnnnnnnnnnnnnnnnnnnnnnnnnnnnnnnnnnnnnnnnnnnnnnnnnnnnnnnnnnnnnnnnnnnnnnnnnnnnnnnnnnnnnnnnnnnnnnnnnnnnnnnnnnnnnnnnnnnnnnnnnnnnnnnnnnnnnnnnnnnnnnnnnnnnnnnnnnnnnnnnnnnnnnnnnnnnnnnnnnnnnnnnnnnnnnnnnnnnnnnnnnnnnnnnnnnnnnnnnnnnnnnnnnnnnnnnnnnnnnnnnnnnnnnnnnnnnnnnnnnnnnnnnnnnnnnnnnnnnnnnnnnnnnnnnnnnnnnnnnnnnnnnnnnnnnnnnnnnnnnnnnnnnnnnnnnnnnnnnnnnnnnnnnnnnnnnnnnnnnnnnnnnnnnnnnnnnnnnnnnnnnnnnnnnnnnnnnnnnnnnnnnnnnnnnnnnnnnnnnnnnnnnnnnnnnnnnnnnnnnnnnnnnnnnnnnnnnnnnnnnnnnnnnnnnnnnnnnnnnnnnnnnnnnnnnnnnnnnnnnnnnnnnnnnnnnnnnnnnnnnnnnnnnnnnnnnnnnnnnnnnnnnnnnnnnnnnnnnnnnnnnnnnnnnnnnnnnnnnnnnnnnnnnnnnnnnnnnnnnnnnnnnnnnnnnnnnnnnnnnnnnnnnnnnnnnnnnnnnnnnnnnnnnnnnnnnnnnnnnnnnnnnnnnnnnnnnnnnnnnnnnnnnnnnnnnnnnnnnnnnnnnnnnnnnnnnnnnnnnnnnnnnnnnnnnnnnnnnnnnnnnnnnnnnnnnnnnnnnnnnnnnnnnnnnnnnnnnnnnnnnnnnnnnnnnnnnnnnnnnnnnnnnnnnnnnnnnnnnnnnnnnnnnnnnnnnnnnnnnnnnnnnnnnnnnnnnnnnnnnnnnnnnnnnnnnnnnnnnnnnnnnnnnnnnnnnnnnnnnnnnnnnnnnnnnnnnnnnnnnnnnnnnnnnnnnnnnnnnnnnnnnnnnnnnnnnnnnnnnnnnnnnnnnnnnnnnnnnnnnnnnnnnnnnnnnnnnnnnnnnnnnnnnnnnnnnnnnnnnnnnnnnnnnnnnnnnnnnnnnnnnnnnnnnnnnnnnnnnnnnnnnnnnnnnnnnnnnnnnnnnnnnnnnnnnnnnnnnnnnnnnnnnnnnnnnnnnnnnnnnnnnnnnnnnnnnnnnnnnnnnnnnnnnnnnnnnnnnnnnnnnnnnnnnnnnnnnnnnnnnnnnnnnnnnnnnnnnnnnnnnnnnnnnnnnnnnnnnnnnnnnnnnnnnnnnnnnnnnnnnnnnnnnnnnnnnnnnnnnnnnnnnnnnnnnnnnnnnnnnnnnnnnnnnnnnnnnnnnnnnnnnnnnnnnnnnnnnnnnnnnnnnnnnnnnnnnnnnnnnnnnnnnnnnnnnnnnnnnnnnnnnnnnnnnnnnnnnnnnnnnnnnnnnnnnnnnnnnnnnnnnnnnnnnnnnnnnnnnnnnnnnnnnnnnnnnnnnnnnnnnnnnnnnnnnnnnnnnnnnnnnnnnnnnnnnnnnnnnnnnnnnnnnnnnnnnnnnnnnnnnnnnnnnnnnnnnnnnnnnnnnnnnnnnnnnnnnnnnnnnnnnnnnnnnnnnnnnnnnnnnnnnnnnnnnnnnnnnnnnnnnnnnnnnnnnnnnnnnnnnnnnnnnnnnnnnnnnnnnnnnnnnnnnnnnnnnnnnnnnnnnnnnnnnnnnnnnnnnnnnnnnnnnnnnnnnnnnnnnnnnnnnnnnnnnnnnnnnnnnnnnnnnnnnnnnnnnnnnnnnnnnnnnnnnnnnnnnnnnnnnnnnnnnnnnnnnnnnnnnnnnnnnnnnnnnnnnnnnnnnnnnnnnnnnnnnnnnnnnnnnnnnnnnnnnnnnnnnnnnnnnnnnnnnnnnnnnnnnnnnnnnnnnnnnnnnnnnnnnnnnnnnnnnnnnnnnnnnnnnnnnnnnnnnnnnnnnnnnnnnnnnnnnnnnnnnnnnnnnnnnnnnnnnnnnnnnnnnnnnnnnnnnnnnnnnnnnnnnnnnnnnnnnnnnnnnnnnnnnnnnnnnnnnnnnnnnnnnnnnnnnnnnnnnnnnnnnnnnnnnnnnnnnnnnnnnnnnnnnnnnnnnnnnnnnnnnnnnnnnnnnnnnnnnnnnnnnnnnnnnnnnnnnnnnnnnnnnnnnnnnnnnnnnnnnnnnnnnnnnnnnnnnnnnnnnnnnnnnnnnnnnnnnnnnnnnnnnnnnnnnnnnnnnnnnnnnnnnnnnnnnnnnnnnnnnnnnnnnnnnnnnnnnnnnnnnnnnnnnnnnnnnnnnnnnnnnnnnnnnnnnnnnnnnnnnnnnnnnnnnnnnnnnnnnnnnnnnnnnnnnnnnnnnnnnnnnnnnnnnnnnnnnnnnnnnnnnnnnnnnnnnnnnnnnnnnnnnnnnnnnnnnnnnnnnnnnnnnnnnnnnnnnnnnnnnnnnnnnnnnnnnnnnnnnnnnnnnnnnnnnnnnnnnnnnnnnnnnnnnnnnnnnnnnnnnnnnnnnnnnnnnnnnnnnnnnnnnnnnnnnnnnnnnnnnnnnnnnnnnnnnnnnnnnnnnnnnnnnnnnnnnnnnnnnnnnnnnnnnnnnnnnnnnnnnnnnnnnnnnnnnnnnnnnnnnnnnnnnnnnnnnnnnnnnnnnnnnnnnnnnnnnnnnnnnnnnnnnnnnnnnnnnnnnnnnnnnnnnnnnnnnnnnnnnnnnnnnnnnnnnnnnnnnnnnnnnnnnnnnnnnnnnnnnnnnnnnnnnnnnnnnnnnnnnnnnnnnnnnnnnnnnnnnnnnnnnnnnnnnnnnnnnnnnnnnnnnnnnnnnnnnnnnnnnnnnnnnnnnnnnnnnnnnnnnnnnnnnnnnnnnnnnnnnnnnnnnnnnnnnnnnnnnnnnnnnnnnnnnnnnnnnnnnnnnnnnnnnnnnnnnnnnnnnnnnnnnnnnnnnnnnnnnnnnnnnnnnnnnnnnnnnnnnnnnnnnnnnnnnnnnnnnnnnnnnnnnnnnnnnnnnnnnnnnnnnnnnnnnnnnnnnnnnnnnnnnnnnnnnnnnnnnnnnnnnnnnnnnnnnnnnnnnnnnnnnnnnnnnnnnnnnnnnnnnnnnnnnnnnnnnnnnnnnnnnnnnnnnnnnnnnnnnnnnnnnnnnnnnnnnnnnnnnnnnnnnnnnnnnnnnnnnnnnnnnnnnnnnnnnnnnnnnnnnnnnnnnnnnnnnnnnnnnnnnnnnnnnnnnnnnnnnnnnnnnnnnnnnnnnnnnnnnnnnnnnnnnnnnnnnnnnnnnnnnnnnnnnnnnnnnnnnnnnnnnnnnnnnnnnnnnnnnnnnnnnnnnnnnnnnnnnnnnnnnnnnnnnnnnnnnnnnnnnnnnnnnnnnnnnnnnnnnnnnnnnnnnnnnnnnnnnnnnnnnnnnnnnnnnnnnnnnnnnnnnnnnnnnnnnnnnnnnnnnnnnnnnnnnnnnnnnnnnnnnnnnnnnnnatatatcttatcctattaaggtaaaaaaaataagtcctacttagttaaataatatagttataataatattaaagtaatttaggaactatagtctataatcgaggatactaaggcccttaataactataaggctaagttaactatagtagtaaagatactaaaaaagaataggactaagaatatatatctaaaatataagaagctttaattatagattaaaaattagtactatattccctatattaatagaatttatatataggtataggtaaagttattatatctaactaaacttaaatactaatagaatagtattaaaaatataatagagtagtaaaataaactctatacttagggtatcttaggaaataggggctaagtttatagggataaataaagtattactaagtatacctatattaagaactatactttcctctataatattaatagaagtattaaagaactccttaactttagagatttcccttatattttctataatccctaaggctctaagaactttagtaattactataatctctatagcttctataatagtagtagcctttttagccttattagctatataggttaagtacttaatattctacttaataatatatacttaaggtatataagtatatataggtaatatattaagagtaatataggtagtagactaaatcttagaaggaagctatactattattaataataaattccttcctataataatatagttaaaacttataaggatataactatactttataaaagagtagtaaatatatttaatataacctataagggtcttatacttatagtctaggtagctttataactagaaaaagtattactaataaggtaatagccctttaataggcttaggggtttctaaatatgatactattaaaatagaagtatattctatagaagttagaaatactaagtacacttattactagctataaaaagctaagtaagtactatatataaataattagttataaaggaaacctctttactattaggataatactagcccttaatagttaacttcaattcttctaattagatagctactaggagcctaaatagtataataaatattagaaatccttcttagatatattagtatcttattaagaataccttactttagactaggggttagctaatatattaactataatattagctagctttaggctatataggctactaaagagtaggtagaagtctataagactagctattaataaggtaacctaataccttaatagtagtatactatatcttagtcttccctactattttactatactatactaaccactctctacctttagaccttattaatactaagcctttatagttctagtaggagaataaaacttattttcctataattatataacttacctacgatatcctcttaatactaataactagggctagtattaagtaactctttaatactatataggatatttactattattaccgcggttacctaaagtctaagataattaaggagcttatactatactactatataactaagtttagtattaaggatactaagataaaggaattatagtagttacttagtctaatagaggctaaggttaagaataaggagagtactaactttctagaggatagtaagtataatctaattaataataataaggaggagaagggaggggaaggtaatagggtataggaggtatctccttcctccttagctagtagggataggggtagtaatagtgatagtaagatagagggggtttagctagatttactagagcctattactctattttatatatcttagaggaagtataagagtagggttaataataattatatatattattagaatatattaatagtactatcttcttaatttttactcctttctttaaattttcctagtattctagctataactaggatatataataatataggttagaaatatattagttatatatctatacgctagaggcctatttatattatataaggcctatataggcccctattataggctataggcctagggtatcagcctataatttagtgtgggccgaagaagttagcctaaagcctagcctattggtaggctgggctgggctaggctataggccgggtgggctttgccaatatctactcctatctagtctacagtcccctatatacctaggacaggtactccacacaccctaacaggtacaatacttcaggcatcagccttcttagtactagggtcctgacatttatatatatgacctgatttctgatccaaggggggcctttaatatatagcttatagaccttgagtattgaaattgaagaaagaagcacaagtatcagcaactagtctatatgcaccataagtgactagcaccacaggcaataaattccagggaagactatctagtccttattgctgcctgataccataaatatgagattaggacatgtcacccataagatcttcatccatctcaagtccagcctccacccctacaatgggattgacttcactagaccccgaccaaacttgacccttgtgtaggctatcaacgtactcatcgcttaatcccagattgtgattagttttgccaagattaataaccatggtctccatgagcttcatctcttgcttgagttgggactgtaagtccaactcatgagagagtcgaggtaacgaatggatggatgagaaccgcagcatagaagattcagcatcatctttggtctgtaccaatgtcgcgttcaaatcacgagacatgatgagggatgaaacagcggatccagtaacttcggcggacacaggggaggggaacacctgcttcgagaggtcgaccatcgttaaagctgcgaaggtcttcccaagcttgatcacggtttgactgaagaaagcacccactacctgggtaacaagaccgagattattgtcctagagtggcggcattagccctggatgtcaaaacgataccacctactcaattagcaccacaacttaccgcgcaccagactccattggcagcatcaatttcagcattaagcctcttcaaatcaccacgttcaaatgcatgagcaagaatgatatagggcctcgcaattgattgatacactttagccacatgaggtgttgtgatgcttggaggcggacagagctgtccacaaaaataattagcttgagaaaacaatgctgtcgagtctcctttcttttctttctcagatatcttaccttgcctttttctagcaagcttaccagcacccattttttgtaggcttccaccataatcaagctcacggagttagtactaggtgtagagatgacaatcccaaggaaatgaagtgcattgcgccactccttcaacgccatgtacaccataccaccataaagaaagtactgcaagtagtctcgatatgatagcttggatgaaatccgggaatcttcggtcataaaggatacacctgacccgtgatctgcgcagagcacagagggatcggaagggggacttcccagcgagattgggaaatgacaaatctgcttattcaagaccggcaatgcacaagaatacgccttggcctcgagacaaagccggacaagcaaaaggtgactcgaggtgaaaacggcacatgatgggtcgagacgaagcatagcgtctttgaccagcgtagcacctagcagtggctgtagtagggttaggttagcaattagatataagaaaccttgaaaaatagccgacttgccattgatgcagcttgtgagacttgccccactagctcaataagttggcgccattctcgcccagcgtatttgacctgaaccccatcgaaactcgtcaaaaaatgtgcagcgcatatccagagcttcccagaggggcgaatatctgctggaaatgaatcggcattcagttcctgtgccttttgtatttgcacatgtagcacgaaaagatatgggatagaatctatcgctggatcaaaacgctaaagacaaatacatattagttgcgatcttgccactctatagaaccctctcagatggacttgatacaaataaagctgcttacatcgagaaaagactcatcattagcaagtgagtcgagtgccttggttgtttgtagccgcctgaagtattgaactagctcgcgaacctgacggtcatactcatcgctgggtgggtgattagagttgtgtaactgcgccgatgcggagataatatccgaaaggagtgtcatcctggaagtgtatgaaagagaagcacaagatagctcagcgtcaaatgcgcaaaggtgtgttgtttctaaaaccagtgtgatatcttggctctcgcttttatgatatcaggattgccatacaatagagactcaaggttggacgaggaaaagagagcgaaagaggagaagagagatttggtaaagtgttgtaaaagaaacgcgacgtaggtagttgtgatgattattggagacatctggacctcggaaaggtgggtaaatccgagacgagcgggatcgataacgtacccctccacactgagtgtgactcaattttttcttttctctttccctttcctctacttctacaactttcacttctctccgacgattatcgttcaatctatataggagcggaggttatttggcaccatgtcattgaccgaatccgtagcagttgatgtcgcccatagcgcatcacttgcctctcgtcgtcttgcaactttaaacaacgatgaccgcaataaagctttgacgttgcttcatgatgcattggaaatgaaccaaaaggacatccttgaagccaatgctagggatgtgaaacttgctactattgcagccgacaatggggatttgagccatagcgtgctcaagaggcttgatctgtcgcggcctggaaaatacaaagatatgcttgatgggattttgagtgtgcgagatttggatgaccctagtgagtttactttccaatctttaagcttcattgagacagtacttaatagtatacaatcatagttgggaaagtcacactgcgaactctccttgacgatggtctgacattggagagagtcagctgccctatcggtgtgctactgattatctttgaggcccgcccagaggtaatagcaaacatcgctgcgttagccatcaagtcgggtaacgctgctattctgaaaggtaacacgcaagcccttataaaggtttcatgatattgttccattgacgcaaatttctaggtggaaaggaatccatggaatccttcgcggcaatcgcgaacgttgtctccaaagctatcgccgaatctcgcgtaccggtatcatcgattcagctggtcaagacacgcgatgcggtgtcttctctcttggcccaggattcgttaattgacctggtcattcctcgaggttccaacgaactcgtccgtttcgtgaaggacaacacgaaaatccctgtgcttggacatgccgatggcctttgttctgcttacatacatgccgatgccgatatcgatactgctgtgaaagtgattgtggattcaaaaaccgactatccagcggcatgcaactcattggagaccttgcttgtccatgaggatacccttgaattggtcttcccggcggtagctgctgctctcctagagaaaggcgtgacccttcgttgtgatcctgattcaaaatctgctttgaccaagacattgccagccgagaaatcagtgcaagtacaaacggctaccgaatccgactataacactgagttcttggaccttgtgttggcagtgaaaacaattccctcgactgaccctccaatcgcggccgtggaggctgccattacccatataaatatgcattcctcaaagcataccgagataattttgactcggtcaaaagaagcggcggatatgttcatgggcggaattgatagtgccggtgtcttctggaatgcatctactaggtttgccgatggcatgcggtttggatttggtacagaagttggcatcagcaccaacaaaatccattcccgaggaccggtcggacttgagggcctgaccatctacaagtacttgatccggggaaatggtcacggtgcagcggactatgacggtgaaggaaggaaaaaatatctgcatactagactgcccataggccagtaatcgcctccagcgcaacgcatcaatagaaggatatcattttagaaaatattttttttcttgctttcttgtttgaaaaatcccataagaaaaaacttaggacaaagcctgattcaattttcttttgccccttcattcgtaaattctcatttcccagtccaaccaaagacatcccgccacttttaagtacacagacttgaggcctttggctagaactgaaacgattccaggcaccgagaaagtcaatgtggccaatgcatcttttacaatacatacacaccgcattaccctcatcaagtcccttagaccttgaagcccttggaccttctgcgtccacgggcccgctcgaacttgcggcccttgcttgccacatacggcttctgttttgagtcagtaaatttgaatcacataatctcgttttccagtagtcgtaatcataacgcaccttgtcggtgtgaggaccgaagccgaagtgcttcacggcctcacgggcgttcttaggtccacgcaggaggagagtgttggcaccggtaggagcgcggagagcaagctggtcaagagtcaaagtctcaccaccagccttctcaatgcgagcgcgagcggtagcggtgaaacggagagcagcaatcgacagcttagggacggtcaaaaggcggttgtcatcggtgacagtgccgacaacgacgacggtcttgcccttctgcgcctcgctgatgttggcgacagcgcgagaaagtgaaacaggggggcggttgattctcgacataaagagacgacgaaggacggccttgttaaagttggactcagtgcggcctatcacgcatctcatatcagcctcacgaaaatccccacaacggtatacctgtagaaattgcgctgcaaacgaatttcggaatcgggaggagggggggggggggggggttcaaaggacacaannnnnnnnnnnnnnnnnnnnnnnnnnnnnnnnnnnnnnnnnnnnnnnnnnnnnnnnnnnnnnnnnnnnnnnnnnnnnnnnnnnnnnnnnnnnnnnnnnnnnnnnnnnnnnnnnnnnnnnnnnnnnnnnnnnnnnnnnnnnnnnnnnnnnnnnnnnnnnnnnnnnnnnnnnnnnnnnnnnnnnnnnnnnnnnnnnnnnnnnnnnnnnnnnnnnnnnnnnnnnnnnnnnnnnnnnnnnnnnnnnnnnnnnnnnggggggggggttcatacgagccaagaagcggtagagcttcaccagaaccttcaagtagacgttgtcgctcttgggagccttgcggtggctgctccgcacatggtggcggtccaagtcgatacctgcaatttatgaacggtcagtggaatgaactgacaacgagaagaaaaagcgaaggggttcgaatgaatgctgcgggatgcgataatcgagtaaaaggagatgattgaacatacccatggctgtgtattggtcgacttcccgggaaatagcttgctgtcgcacccgtatggaaagtgcaggaggtttttgatccttgactttcggctggacagtggtgtgtgggtttagccctacgctagacctgactaggaaaggcgaggcacatgacctaagtaaagccacgtgacttgtacatgtttccattcgccacttggtcacgtggtgtaggggtctggttgcatctaacaaatgaaccttatcttcagattctgttagttatctgccgtgcactctgtacgtctacatctccaacctacatcaacatcaacaattctgtataacagaacatttcatctactctttatctatgtgtatatatgcattatgtataatcaaatgttaatgataaaaatgagaaaaatatatctaggcacatatgttattagaactattctccatcattcaagccgacaaagaaatcacgagtcatttcataactcaaccagctgcttgccatactaggagcaactttcagaagattcggccctatccccttgaagagtccacgtagtccctcttcagccacgatgaccctcacagcatcccagatcgaggtgtattggtaacccattcccgacattgtgttgatctggaatcgccgacgtaggacatcactaagggaaagtcagtttcacggggcctagccaaatagaataagataaccgacaaaggataggtacaggtctgggcgactgccccagagaccgcgccggcgagtaattttcgacaagagctagggtttttgtccccttctggtgttagatacttgcgcgccgattcgtaggtcatgaaattgagtcccacctgtggttcgtcagttgtgaccaagtcaaattaagctgaaaactcacgtatggagctaccccagcaacagtaggaacaattccacggtatagagcctttgttccaccttcattcttatagatcatggttattgtcgtgaacatgcctggcagtttctggcttggatctcttgctccaagttcggcaaatgaagcagattgaatggaaagtcgtgttcgaacaatgtccagaggataggtgatagtcaccgaagtgataccggcaaggccgccacaaaaaaggcgaagcatcggggtcatctcaccatcgggagactctacgaactgaatcaaagaaatgtcagtttgcatcaaaccctagttctgcaggatagaaatagccacccacttgcttataaaaattatagcttccaaactgtaccgcagagtaggggataatgcgaatacagtttgttccatttcctcgcatgaagccccgccagccttcttcccgccccatctttactaaggctttccagattgacaatctgtattctgttcgaccgacgctttgaatctgaagaaggattttcaatctttcgagtggcgacactattgtcctggaaactgcaccagccactccaccagccataaatgcagccaccattggttcggcgaggtacttcctagtacgaacccagattgagggagttttctccttaatcagctcctgcttaatcaactagtcagcctcgcagcgcatatggaccggagatccccttctcaccttagctgcatttgaactagatggaaacttggatagagtctgcaaggcaggctttggatcaccttccaactgctccttttgaacatcctggcgatctaagctcatcttgacgatatgcacatccggttcggcaatgaggttgataaagaagtcctttgtgatctgccgtgtaatgattttctgaaattattttaattggagaatgatgcttgattgtcgctgaaaatcaaatgcgatataacactattgatgtagtgctagccatgaagattgattgttttccaaggcttggtgatctaaaaacacatcattgattttgtgtcaagtggtgtattgcttttttttccaacggccatataactgaggtataaagggtaatgttgatagtggatttgccaaaaaggagaagcgtcgaaaagaaaggacgggttgttgggccggagttgcttttcttttccccttcaatgttgggaggagatgtcgttgaacaggtcaagagaaagaaggaataagaacacaaataaatcacacaagaggtggtatgtatacctggaaaaggtgcttggaggtttagaaagagaagaacatcccgacttaccgacagacacggtacctcccgatagtccgccacttatattacgtacctacattggggggtccacgggcgaactagttacatagtatagttccctcaaaccgattgtataagtactccagacagatcaaatctagatctagatctatgatttaaataaagaatattacacttgtcaagagcctatttatcaataccaagtttctctcgtaaaataaaacagagaagaaaaatcaaagaaaccaaagaataaacctttcatcaattgcgtcattggcatgtttgatccaccgtagcacctttatcacgatttctttcttgcgccctctctctcttccttatactctttatcctcttgaagcttcttaagctccatctctcatttcaaattcttccaaatactttccaactgacacaatcttctttatttttcattgctctgtgctaacggcaccatgtcttctcgctctggaactactctgtatgttaccgggtttggccatggcacccgtgctcgcgatcttgcctacgaattcgaacggtacgtgtcgcctataccttcgcctctacgaacttcgattcccatccttccgacgacctcccgatgaagaccattggcactaaatgccttggacgacactcttctttctactagcgtgacattggtgtggaagcttgtgtctacgttgccccgtctcactccttgggcaactgtcagctagtcttggtcattccttatcataatttctcttaataccgatacctgaagctagctcaactgattttggaactagttatgggcgtcttgttcgctgtgatatccctgccccgcgcactccctctagccgactgtgagttgaaatgatatctgaaaccactttacctgtctaatctaagtcgcttagtttcgcattcgttgaatacgagagtcgccgcgatgccgatgatgcttaccacgagatgcacaacaagcgtatcggccgcgatgatttgctgaagattgaggtaagcatatccgcccccccgaagctttgttaaatatcttttaacctatctccagtgggcacgtactcctccctccgcttcctggcgctttgactctggctctggccgtgacgctccccgtgacgctccccgtgacgctggccgcgatgctggccgtgatcgtcgccgtgatcgcactcctcctcgccgtggtcgttctccatccccccgtcgtagccgtggcggcgactattccccccgccgagatgatcggtacgaacgtgacgccgaccgtaccgaccgtgactacgaccgccgcgaccgtgatcctgaccgccgtgaccgtgaccacgatcgacgtgaccgtgaccgttctcgtgaccgctctcgcagccctgacgaccgtgaacgcgatggcaaagatgaccgggaaagacgcgatgatgatcgcgagcgtcgtgaggaggaccgtgaaaacggccccaacggtgaggacaggaaaggtcagttgcctcggaatctaacctagaaaacgttcttttcactcacatacagcagtacccctggacccaatgccttctgctcatgatgagcttgatactgctgagtagataaactcagtattacgttcattcgctctcgaaccatgcccccgtcgtcattcttttttcgtcttctgaaggtgtccttcattgcggttgagccaacggggagggaggatacaaagttatcgcccagtgtttctcttaataccaccctgtggcatatctcgtatctcgtccccctttgcctcttgtgtgcttctgatttcaaatggcatgaagcttgctcttcgggacaagctggagccaagtgaatgtgtgacccttgctccccctaccttttttttttttcgaattttccttttccccaagttattcccaatatttcttttttgaggttggtaatttatcctggtcagcagctcggatcccaccgaagcgaacgtcgagcgaccgttccaagtcggcgcccaaaaaccacgatgaaatccgtttcgcccttcgtcttgttcgcaatttaatttgaaagcggttatttcaattcctcgccctctccgaccggtcgccatcctatgtggtctggtattttctaaaccactgtagtgccttagttgtatgtgaggtcaatgcaaagcaccagttctatggctttgttaataacaaaaaaaagcaatagaatttctgagatcatgacatgacgtaagctatttggcgcggggaaccgcaatcaatccatcaagcaatccagtagaagcatccctgaagcccaaattattgcagctttattcaactttcagctactttatactacctcctgtcatgagttcagcaaagaaaacaggtatcagcattgctatcgatgtattacctcccccttcactactttattcagaacactgacataacaaagagaggcggcacatttacagactgcattggaaatccagggacaggccgcttggaagatgacattgtgattaaactgctctcagaagaccccaacagctacgaagatgcacctttggaggggatccggcgtattctttccaaatttaccggtcatgaaatccctcgtggggaaccaatcgatacttccttgattcagagcattcgcatgggcacaaccgtggcaacaaatgcgctactcgaacggaagggggagaaagtggcactagtggtaagcaagggcttcaaagactgcctcgagattgggaatcagtctcgtcccagaatatttgaccttgctatcaaacgtcccgatgtcctttacgaggaggtggttgaggtagacgagcgtgtcactttggaagactacgcagaagatccgcaacgaaacacaactgccactactctccgggaacaggcccgggcagaagacgaggttgttcgcggcctttcttcggaagcagttcgcatactaaagcgcccatctgagggcttggtgagatcacaactgaacgaggtatatgaccgcgggattagaagcatagcagtatgtcttatacatgggtacacctttccagaccatgaggcactggtgggaagaatcgccaaggatattggtttccaccatgtgagtttgagccaccagctcatgccgatgattaaacttgtgccgaggaccacttcagcctgcgccgatgcatatttgacccctgccatcaagaagtatatctctggattccaagccggatttgaaggtggtctaggcagtgaaagtgtcaaacagcaggcgagcgccaaaggtgctcgctgtgaattcatgcaatcggatggcggtcttgtggacgtggaccaattttcgggcctacgagcaattctatcagggcctgctggcggagtggtggggtatgcgctgacttcctacgatcccttgtcgaaaataccagtaatagggtttgatatgggagggacgagcacggatgttagcagatacggatccggtcggtacgagcacgtctttgagacaaccactgctggggtgacgattcagtctcctcagttggatatcaacaccgttgctgcaggtggtggctcgaggttgttctaccgtaacgatctcttcgttgttgggcccgagtcagcgggagctcatccaggacctgcatgttaccgcaagggtggaccactcacagtaaccgatgccaatctgtttcttgggcgattggtcccagacttcttcccgaagattttcggctcagatgaaacccagggactggatgaacaagctagtcggatgttgttcgaagaattaaccaaagaaatcaaccacaagttgaccaaagggggccaaagtcgagaaatgtcccctgacgaggttgccttcggttttatcaaggtagccaacgagacaatggcccggcctattcgatccctgacagaggccaagggacatgacacatcaaaacataggttggctacgtttggaggagccgggggccaacatgccgttgccattgccgagagcttggggattcggcagattttgattcatcggtattcctcggtgctctcggcatacgggatggcactggcagacgtcgttgatgaaaaccaacagcccgaatcgaagacctgggctgatgatggcaaggaggaggttcggtatgcactttcttcaagaatggaagaattaaagaaacgatctacgcagaggctgcaagaacaaggcttcgacaatggttcaattgtgtttgaagaatacctcaatatgcgatatcgaggcacagaatctgccttgatgatacttaaaccaagcaaagaggaggccgatcttcactttgggggcgacgaatgggcttttgggaaggcatttatgaagcaacacgatcaagagtttggttttactctcccagatcgggacatcattgtggatgacgtgcgggtgagaggaatcggcaaaggattcaaaatgtccgagaagactgtggaccggcagatccaggagtccaacccaaaggatgtgacgacgggccaagaacatcgcaggtctcttgtatacttcgagggcggccgacttgaaacgccaatctataaactcgacgacttgaaggttgatgagcgagtaagaggcccagcgattttagccgatgccactcaaacaatcgtggtgcccccagaagcttcggcgctcttgacaaaaacccacgttgtcatcaatattggggaatctgatgccagccagccaaagattagcactggtaatgtggatcctatcctgctgagcgtcttctctcacagattcatggctattgccgagcaaatgggacgtgctctacagaagacaagtgtaagtaccaacgtaaaggaacgacttgactactcctgcgcattgttcgacgcagcaggcgggcttgttgcgaacgcgccacatttgcccgtccatctcggtagcatgtcaacatgtgtacggatacaggcccggatctggcaaggtaaattgaagcccggcgatgtgatcgtgtcaaaccacccggaatttgggggaactcatcttccagacatcacagtcctgcagcctgcttttagcgagggaaagatcatattctacgtagcttctagggcgcatcatggtaagaccccccggcgaaagggagaagggggaaacaaacagatatactaacctgcatgaagccgacattggaggaatactcccgggatctatgccacctcattcaaaagagctttaccaagaaggcgcagccatcaagagcgaaaaattggtatcagaaggcaagtttaacgaggagcgcatcacagaattgctgtacaaagagccggcccagtacccaaactgcagtgggacgagatgcctagcagataacttgaatgatcttaaggctcagattgctgcgaataagaaagggatcaacttgatcagcactctaatcgaggagtacggcgaggatgtcgtgcagttttatatgcaccagatccaagacaatgcagagctcagcgtccgcaatctactaaaagacgtgagcaggagatttgctggtcaagaactgagtgctattgattatatggacgacgggagccctattcaattgaagatatcaatagatggggagaaaggagaggcaatcttcgattttgagggtacgggcccagaagtatacggtatgagagtggctttcaaggtgaaacctgatgtatgagctgacaatgacaggcaatatcaatgcaccggaggccgtcacatattcagcgatcatttattgcctgcgatgccttatttcagcagatatcccattgaatcagggctgtttaaagcccattgacgttcgaattcctcctgggagtcttctatccccctcggaatcagctgccgtggtgggtggcaatgttttgacggtaagattagacagatactgacgttgatcatgggctcatttcttatttcttcagagtcaacgagtgaccgacgtcattttgagatgcctccaggcttgcgctgcgtcgcagggtgataccaacaacctcacatttgggtttggagggaatatgcccggtgagacagaaacgaaagggtttggttactatgaaaccatcgccggcggtagcggggctggtccgacctgggaaggcacttcaggggttcatacacacatgaccaacacccgaatcaccgatgcagaggtgtttgagcggcggtaccctgtgatcctccgagaattcagtcttcggccgaattcaggaggtaatggtcaacaccgcggcggggacggcgttgtgcgagacattgaattccgtattcctgtgcaagtctctatcctctccgaacgaagagtctatcatccatatgaattggagggaggcgaggacgcccagtgtggtcagaacatctgggtgcgccgcgtgagaaagcatgacggaagctgggaggaaagatatatcaatctcggcgctaagaattccgctcagatgctagcaggggagcgaatcattatccgtacgcctggaggaggagggtggggccaaatcggagaccagcgccaacttctcgaggagaaagatcatcgtcatgcttggcgggggggttctattgccaacaacatggcgacgcaggaggcgagtatatgatttatagggaaatttgggagtgagttgattcaatcggccaaggtcaatttgattatgataagaacgacaagggctatttatgggcaacgtaaattaaatcctccatggcaattatgcttcactctcctcatcacttgtcgcctcaatattctgctttgatagaccttggttgtccgaatgagcatgtccttgctctccttgatcggacaggccaccctctgccgagtagacaggccgaggcagagtttccccattttctttcaatgcctgctcaatctcaggtagaatagagacgatagtagcgaattgatccacgggcattgagataccctacgttgggaatgagagtattagcacggtttatgaaaactgactgatcaatcaaccttttttcctggcaactcctgcccgtccttttcatagtattctctaacattcacctgggttttcccacggaaagaagatatggtcaggcggcgcattttggatatttcccaatagcgatctccattagagtcgattttggtttccgctgtggtattgaccttggccttcttggggcgcacgctattatcaaggccaacgccggagtcagacgaacgtttcctggatgacatgacttgaatatgatattgggaaatgcgattgggagaacggatagaaaagatagaaagagtaagaaagtggaaaggtgtccaagcacgaatgcgaaacgcgaaacgcgaacacgtcatcacgtgaagaccaacattatatactccgtgttcatctttgacaattcctacctacatgtggtctctcatgtatattccaatatgatccattgaacatttaaagagtcaatactctaaggccctgtagtaaaatcgagaagacaaatcctcgagcgacactctcaacttgaagactatcaaagatcttctctagcgcttctcgactagcagctgcccccataacacttgttaaggcctgtggaattccccgctgcacaaatagtttacgtgcagtatcccgtaatcggatcttctcctcctcactgggtggagagggccaggctttaagttcctcctctgtcggaagcgcgttctcacgaagcttgacgaggtaataccccagggcgtcgtccgaagtgtggccttctatcatggaatcttgcaacagcgtacgaatagtttccaatgtcgggctgccgggacgtagaatatacgatttggcagcattcagaagggtccggcgtatgttccacgcagacgacaaggtgtacaactcattgatgaccgcaaagatcagctctactgctattttcgtctcatcagctgtgatgggattcccctgattgcggggtttatcaatactctgcccagtatctgatcggcgatgtgatgaggtttgatcaatagtttccgttgcccggacatcaagttctgcagtatgatcgctgatatcaagtgaggttttagagggtgagatctctgtggtccatgcaccccgttcactctcaaacgactctctggtactgccaaccgaagacgacttggaaatttcgcctccttggatttccagggggtcgctagggaacaccataggcgaatcaacgttttcgttgcttacgtcggtacgatcagcaaagctaaaccgtgtctgcgaccggatggcgcgactggagtcatcaactttgggttgaatctgatcagcaccgacagccggtttcttgccattggcggtgccgccaaacacccctgtcattccttcaaagacggctttaccgccccctgccactcccctgggcgcattggtcaatgcacccagcatacccttgcccatgtgttcaaacgcaatttgactagggaaagagaatcccggtttgttgttacagctaggttgagtggaagcaccagcgtctttttgcaaaaatcgccgcattcgatcagtgtcggcaagtgactcgtgcttcatggcatcttgtaaataccacccaaggtcccgagcgagagctagtcgtgttttgcccttccaggtgggcagtatggggtgacgctccgagaaactcgaaatctgattcaatcgtgaaacggtccccagtatctcgtgaagagattggaagtccgaatatttgcgaaacaccatccatccagtcgagcgtgttgacgctggttcgacctgtagcagataatcccacacgggtcgcgacttgatttggcctttttcatcccttgctccatcatcatctaccaacacttgtgccccatgaagaatcaaaggtggcacagaagagtcttcgaatgatttcgggcttgcaagtgattgcgtattaggtatcggcccctggtcttcgtggttttcgttctcatcagtcgtgtctgaagccaaatcagtgttcaaagggtaattttcgtcaaattgttcgttttggcgcgtccgttctgactccgagttctgtgtatcgtgggatacaatcatagcactcagacgtttcacctctagaaccgcctcttcctctgtagccctcgctacatgcatggaatctctctgtgtggctttgacggagtctgcctttgggtgttctgaagacctaggagcactgacaccctggttccgtgcaccctcaacgcctgcgtcgatagcgtgcataatttcggattcaccgccctgaagaagatagataatccattcattgataaattcaggacgggcaagactggtaacagttgaccccaatatcacgcccgcaaagacctcacggaggaagtcccgtacagccggataattgtaggttttggcatccaagaaattcgacagtatgtcatccgcgatcatgctgagttttttcttttgttgttccgcagacaagacattcgctaggctgctatccgggaattgttcaaggtattggtccacggttttttgggcttccgtcggggatgagctcgcagcagtgaatgctgctgcaagttcattcaagaatacaatgacgatagatgaggagttggtgagaaactgcaagaacgtgtcctctgttcgtttccgcgagaggtgcgaagaaactgaagtaatgaaatgagtcaaaatccttcgacaggagtctggaaaacttggctcggacggtaaaagtggctcataccagtatctttatttgggataagctacttgtttcacggttggacaaggggacgttaatagaggatacttacttgacataatcttgaatgacagcatcggtgagcgttctcagcgcgacagcggtggccggttggaaggtggcatactccaagtctgccgaagacatatcttccagcgtgtttatagaaccatcgtccccctggatgtctgaagcaccagcccgcctcggccagtctaaaagtctgttggagacttccagggcaagttctctacgccggttgggcttttgcacgtgggacgcttcttctccgtgttcgttatctgatccctcccaggacgcgtgtaggacaacccccacagccactccaatcagaagtagaccgattctccccaggacaatataggtgacgagtgcaagaagcgcaaagactccaaggagggtctcattggtagaggttgagagaaaattgaggatagcattgatgagttcctttgagatcgctgtatttaagatgggatctttcgtcgtgggagtattgtggtctttgtcggatggagctgaaatgacttcggagtcgtcatcactgaggcgactcattgtgctgagatatcccgggtttggagggtatccagagtaactttagttaaccctccatgtcaaaatcaaatgtgagtgaccttgtagatctgtgtagacaagaaaataaggggatacataactagcaacctgggaaaaatgcttggcggacttggccagtgcgtacatacctgacactcgtactccggtataagaaaagaacatttagacttcatggatgtacggaaaaccatagacaaagctaaaccgtatatataatgtattgtatgtatccaatcatgatttccttacaagcatgagctatatagcaaggaatctaaagctaacagaaaggagttgatcttcgctatccgagtgaatctgagcattcaaagagcatgcgcttcatgccagatgtaaagagattgcggttgggagaaagaaaagggaggtactctacaggggataacaacgacccaaaaacgacccaaaaacccatctggtcgggatatacttagtatatgtggcccttgggcaacaaaccaccagtcctcatgcggcgttcatcgagaggtacggtactcacttcgatgaaatccaaagacataaattccgaccgcattaagaagaaattcatggattgactcgaggaaataataccgtcggagattgatgaatggtcatgaagaaaactggaggaacaaagatagacaacaaagaagaacgaaagattttgtaggggaattttatattacctaatacttagccgacaattcctcgacgctagtcccattacagttagattacataactggagccgaggtcagttaggtgggcatacaagcctcagatagtgtagtgtatttttccaatcatttcatctatgtttttgttttcgtttatgcctctgtcttctagaaagcatctgcgagagcataaagtgattgacatcctcatctccccaataggtgagatggctagcaatgctggctatcaatgagatatcgaaggctcccctatattccgtcaacaaggttcaacaatgcagggcatatagtcttactcttggatgctgtagtccacacggccgtttgcattcaaggcacgcacttttgcgtcctcgaatttcagcctccgatcctggttagtgtcggcatcgggatctagactctcgccatgatgaacactcctgcttttttggaaaccatcgtaaagagtttctagatcagattcaatcaatgtgtgatggtgatcgtcggatccatcgggtgtatgctgagctgagcctgactgtgaccgtctatggattgattcatcacctattttactacaagtccgagcagccgatgaggcgtcatcgccattcagacccaagctgcgattcaataaactgcttgcaacacccgtggtaaaatttgtccatagggatcccacactttggcccatgcggctaccgagaatagacagactctgaccagaggtcgtccagaggcttttcttcaccgaaggtagaggctgaggcttcagggttgccatcgctggagatatcaaaggctcgacccggtagctcaccgggtcagagggatggaagatattgtagagatctcgacaccttggcgttgagatgataccagcattgtcgctgagcgtatgtctaggaccatgcgagtccaagtcgatctcgacatccatggaatttttgcgatttcggggacctaaggcagagtatccaccaatcgtcttacccttaagcatttgaaatagtgcaatgggtgatcccagacagaaaaactcttcgcagtcaaactcaaacgcacttgaacccttggggtgggccgagtcgtcgctctcatgggccattcccttggaggcaccattctgtccggtattgcttcctggctggtgacacaagatgtcaaatagaatcgcacttccaagcgaatggccgcagagactgactgaccccttaaaagaagggttttgcttccggtacagccggaggattcgattgcattcttggatgacaatattggagatatgttcacagtacccgctttggtacaagagtacatccatagccaaatctgaaatgaggtttcgaacagcaggtacactttccagtgttatatcggacaagctggggtaagcatcatcctcgagagcgtctgcatcagtaagatccagttcttttctgttccgccgaactcctcggtaaggaaagtccagaagatggcgccagcacctgctgaaattagcaaaaagaaatgccgagcaaaggaatcagtctcacacaggaagcacttgaacacggcagttcttatcgctgtctggatgcgccgagttcaacgcttggaggtcaggtgaacctttgtagacagtttttagcgtcttgcgaagcacatttacatcgtgtatgaaattgatgctttccagtcgcaagccgagtcgctggccaattccgtgggtgacaagaactagatgatcaacctcgcgctctctgtccgcgccgtccacttcccttgattcttccatctcctgttcctcctgcctacgagcctgttcctcgaggtcagctggattttgcggctcgcctgcgagggaggacatttggcgttctaatgttgatttcgatccactttcgtagtccttgaacccatcagaggaggttgacttgtctgtgtctttttctgtcttttctttcaaggcctcattcaaacctttggcggggtttgactcgcccagtggtttttgtttaggaccctttgcttctggtgtctcttttggctttctgggctcgaaaccgcgaaccaactttgttcccggaacgccccctagcttttgatataccgaagtactgaagcgtgacatgaaatcatcgttcataagccaggccgtcgtggaatcttgataaccgactatcctattcatgtaagcgccaaagagacgatactgctgaggctccactgtaggactaggactgctggaatcattccctgcggtacgaggagaagagttcgggttgattgattgaggggatttgggatctggctcaaaggtgttgattggcatctgaccagatctatcttcttcgtttgcttgcgaattctgttctgatggctgggacctccatggacacaatttgatatagccctcttcaagttgggtagcaaggttttcttcacatggttttaggctagatccatcctgaatgaaccacgttccacgacggacttcatacacaggaccaatccaataggtaggactcaattctcgttgttccacatcgacattgaaaagaaaatcctcattcacaggcactttggtcaatacaggttcgctgtcgtttggcgggttctgttggcgggcatcttcgatgtctgagagtttctggaacatcgcttcaatagactgagagtctttccctgggaaaggtatgaatttcttcggcgatggtaagggcttttggtccgcctttttctgtcctattatggacggtttccgcttgggcgagtccactgcgtagaaccacctgactttcgatggagggcaatcgggaggatagcgtcgcatgcttaatcgatgcatgtgggtcaccgtgtggtcctccccttgcgaccgctgcaagacatcctttttctggtgatctccaagctgcggtgttgaggttgcgctttttggtgtactccatggagtgagtgtccccaagaacgacttctgctctgcacccgccatggggaggagcgcccgtcggaaggtagcgaaacaaaccaacgtgaggagctgggttgaggaacagcgaaagtgtcggcacgacgtatgaacacgaatagagaaagggccgcggccaaaaaggtgttcaaaacggtaggcaggtgttggcgttgcaatgaatgtttccaatttttggagatgggaaatgatgtaatcccaatttcatgcaattacgttgtaatgtacaatgttataccgtaccatatcaacaatgtccgttcttgacataggcccgttaattatagatatatacatatttctatataaggtcccaattccatgtattcatctttcattgatagtctaaagagttagggactataagccgtggatacgtcaaattcccgaggtcggcgtatatatggctttttctcagtcaattgtggcgaacaccagcataatgaccagctaggtagatgaaatagtttcatgaaaggtcaccatgttatatatactacatagataggtaactaggtaactaggtaactataacatagtatatatgtaagatgtcgacgtcatcagaagaacttcaacgttccccaatacgataatacgagaacacggcgttactgacatgatacttacgctctcatacaacaatacccctggcgtgatgtactctgtatcgttaaccaactactttcattacggtgtggctcgtctccccctcggttcgtctatacctggctgcctttcgctttgcactgcccaccttgagcacgcatcggatttcttctgatcctttgcttactttacctcttgacaattgatctggctcagggtgtaatctacttccctccttttttttttttgtcgcaacacagtctttccctgggtgaacccctcagctgttttgccccagggttgtgactcctgacaagatgaacgtcttcaagcttcagaagtacattctctctccgttcaataaaaacaatatgctgaccattgcgatccatgtaggcgttttccgcagcttgatcaaggcgagatattttcgctccaggatgcattcaacagattggacgtcgaagaccgtggctaccttgatgaatctaccgtgatcaaagctgctcaacaatcagaacgccagccatatgatgtggtgcgtgcagctttgaaggatgtggagctcgacagctcccggcgcgtggaactcgaagattatgttgatgtaatacaatctccccgcttccctttctcaccccgctggtattaatggcatagcagctcgtttccaagctccggacagcccctactgaaggtgtccgcgcagcagctacccccgcggctgtgatccaagaggccggcgctggccctggagcatctcgacatgtctccaaaggcagtgtgggtggacgaatccatgtccaaggatcatcctccaatgtcacgcatacgatcaacgaggatgaacgaacagagttcacgcgacacatcaatgctgtcctggcgggcgatccggatgttggcaacctcctaccttttcccaccgatacatttgagatgtttgataagtccaaggatggcttggtcttggcaaagttgatcaacgatagcgtaccagataccattgatgagcgcgttctgaataaggccgggaagaagatcaagcagctgaatgctttccacatgaccgagaacaacaatattgttatcaactctgccaagggtatcggatgctcagttgtcaacattggaagcggggatatcatcgaagtgcgcgagcatttaattctgggcctcatctggcaaatcatccgccgcggtcttcttggaaagattgatatcaaacttcacccggagctttacaggcttttggacgaggatgaaactctggagcagttcttgcgcctgcctccagagcagattcttcttcgttggttcaactaccatttgaagaatgcgaagtgggacagacggtatgtaccgcccgagggggacacaaataaagacatatggctaaccgatgtagggtgacgaacttttctaccgatgtcaaggatggcgagaactataccgttctcctcaaccaattggcacccgatatctgctcgcgtgcccctctccagactcgagacttgcttgagcgggctgagcaggtcctccagaacgctgattcccttgattgccgcaagttcctgacccctacctcattggtcgccggaaatcccaagctaaaccttgcctttgttgctaatctgttcaacacccaccctggactggacccgattaccgaggaggagaagcttgaggttgaagacttcgacgctgagggtgagcgagaggccagagtcttcactctgtggttgaattcattggatgtgcagccggcggtcaactcgctatttgatgacctacgcgatggctctgttttgttgcaggcatacgacaaggtcatccctggaagcgtgaactggagacatgtcaacaagccaccagcgtctggtggtgaactgatgcggttcaaggctgtagaaaataccaattattcgatcgagcttgggaaacataatggtttctctctcgtcggcgttcagggcgctgatatcactgatggccaacgaacactcactctcggattggtgtggcagctgatgcgccgtgatattaccaacacactctctgcgctagcccagcgcctgggcaaacgtgaaataaccgatactgagatgatccgctgggccaatgacatgtctagcagtggcggcaagtcttccacaatacgcagcttcaaagacaaatctattggatctggaatcttcctccttgatgtactcaacggcatgaagagcagctatgtggattacgatctggtcacgcctggtcggaccgacgaagaggcatacgcaaacgctaagctttctatcagtatcgccaggaagatgggtgccaccatctggttggttcctgaggacatctgtcaagttcggtctcgtttggtcactacgtttattggtaagttaacactttcgtcggtatggcggaaatttaagtctctaacagatgataggttctcttatggctacccacgagaagatgtaaggaatacaacagctcactttgggcaatcgcaatttttatggcattgcataccttttactttgtttcctcaaatacatgtaaatatgtcgcttctcaaggccaacctaaccaagtgtggatctcaattgaagttttattgttatcatgctagatatttccctctccgattgattaaaggtactgatcaaaccatgcaactgcctacaaaaaagtcagactgtttggcaaagcgaattgttagcttggtgatatctgcgcaaacagcaaattcgtgctcaacgccaccgaacaagttgatctggtacggctggccagtcttggccaggatatcctcagattcatggcactttggggccagaaaaattgagaaaatatttagtcccggcgctataaccggatcaagattgtcggccgtcccaggccgtcctttaaatcttttaatgatgctttacttagatatgaatgaattaatctaaaagataagcatgaccaaagctaccaaaaattccacgccgactccgactagtggtcataaaattgcaaatctcaagggtataatgccgctcaagtgacagaaacaatcagagattctatatgacagttgattcaacgaagttaataaaagaagtataagatccgcggctcgtacccgaaaccggatacaagccctacctgacctggtactccgtatagctggctggtatactgcgagaaacggggtggaaaggagtacagattttgacggcgtaaaacataacacaaaacagcacgaaggcagtataagcaccataatcttgagcaaagtcttgcaaacgaattcacccccgagttaattaccagctgcagcaatggacagcgggccttggattgcttgtaattcctctgcgtcgacgaaactagtgtgtgcgacacaggcaacatcgcagggacctggctggaacagtcgcacggcgtattttgtctatatttgtcaactcgggtagcagcaagatatacgaaacatcaacatactccgaagcaatagccgacagcatcgacccgatcgtagcccatgttggactgtgtttcccttggtatcccttgagccacacgttctacacggtctggcagatgacctagaaggcctattagccagccgaccagatcgaagctagcggggcgattgttcaacggctctgggtcaccgtggaataggtctggcatgacgcccagatggccatttgccgctaattggtttgcaatgagctgcgcgttaatgaagcggtgcggtgagcaacaggatggaacgcttgtggaacgcttggggtgtgaaatgtagacctcaactactaccatcagcgaaactgtagtctatttccagagaatcagaagtatggaaatgacgcaacaagcagccggtgaattagattccattaagatacaatcgaaatagcggtacgcgcgcgcgggagagtgtgcgtacaagaagaatatcaggaagaggaagagtacagagaaagatacatatatatcagggtgggatatagagtccgtgcccgtccaatcggaggcggtataaaaaccatgtagtaatcaatatgtaggcgcaatctatagttatatggatttgttgtttacattgaagcagtaaccatcaacggatattcaggtactgtatcaaatcaaatgatcaagtacaagctgcataacagacttggccctgtaaagatacccagccaaaagaggacattgcccaataaacggcgacctctcatcaggcgagtccggcttagcgcaacaagtggtagctgagacatctggaggattagtaggtaacctcggagccgccggaatatgcacagcatgagaagctcatgtacacatgcagataagagaaaagtgatgagactggcagatacccgcgacaaacggtattcgctgatggagccatggtatacatgccgaaataaaaagttatggacaggacggttccaatctcgcgcgaactgatcccacgagaccgagttccaccaatcggaatagaaccctcgatctgcaaacatggtgatctcggccacagcattaagctagatgaacttagcaataaatcaaggtagcaaacagtcaaagagacttacaacacattcccagatcacgtagaatgccagtagatactccatcatgaacggaaaaagcaagtcaccgagaacccaggggaattcccgaagtctctgctgcgcggtcattccctccgctttcatacgcacggtgtccatcaccaccgggtatatccacgattgagagactgcaatcataactacaataacgccgaatgtggcgagggttttctctgcgacatagagccaatcaattttgttggtccgcgggtattcgagctcataaaccaatgtgggcaatgccatgaagtcgcagatatttcttattgtcaagttttgaggatagtgattgttggttagggagcaccggccctttaatccctcagataagaccttgatctcctgctcgagcagttctctgagcgatttcacctggttaggttcaagtggcacaccggtctctatcgttctaataagagataaaagctggtcggtttcatgagatcgagaatagttctgtaggtcagaagagcgttgactaaagtcttttctcttgaggtctatgatctcagcattgacttgtgtatcaattgcagaagagtggcccgtcttggtagaagtagcatgtcctctttctttggctttggtttggccaagacttgctttcagcatatctcgtttgcgatacatttccgatactgccctcattagctcctgctcacaaccggacacaaattgacatacaatagccattgtaagctgcatagctgtgttgcttcatcagcatagccaagcagtgtaatacgataaagaccgtgtgtgtccacggccaatcgcgatggtatgtccaccatataacgactccaaggtatgtagtttgccagatctgcacaggtcagcaatgtaacagcgtcaagggcagattttaagactgacattctgaataagccagccgagaccgttccagcgaatgtatcccctgagtatcactcgttgtagtatcagacaaaaccccgtagaccaacaaaggagcaagtcagtcagtccaaggaccatgacatctttatccatcataagatggataatctcattcttgccccatatgctgccgtaagttctccaattgttggcagcaagcctgaacaacatcaaggtcacccccatccagaagagaacaaaaaatccatggaactggggggcagtggttcccaaattttgaaaagtactcagttgtcgggtaaatttcaggtcttggaacctgaatttccgtttctcacccgactgatgtgagagattgtgcttgagaatctcctgtaaaagctcggcatcctctgcggtgagcaagtattggccagcttgctcagtctcggtcgatgctggttcttccaagtccatgattatgcatcatatactccgtagatagtttcaaatctcaggtcttagagaatggcggcctctgtttttctttccccttagcgcggcaaatgcggcaaatgcgataactgcgtcaaatgacgttctgtcgagatgtggttcctagattggagtatccagggaagaggaaaattatattcgaaagcaaaataaaagtaacaaggaaggtcgggtatcaagtcgaaagagtagacattcatgcaattatatagctgagcttctatcgacttgtcatgcttctccgccttagctctacccctggagttgtttggtctctctcttcttcttattaccattccttaccatgttaccatccattggcccttattcaattgaatcatggataaatcacaaacgccccaagttcgtgtccctggcgaaacccccgaatcaacccaacccgaacccaatgcgactgcgaaccacaattccaccgaggtagagatgggagaaacacaggacacaagccaacctgaacccgaacatgtgcaagaagattcgacactttcagatgtgcaggcagagccagaactacctgctccggcaaaaaagaacgcgggctgcaacttccttgagtgagcattcttttcctaaacatttgcgacacaattactttttcaagatggcatcacctttcattgtcccaatcattactcgccagctcacaacaacttgcagcttcctgacttcacctatcgttgagattatcgttgggaaaggcgacgatgagaccgttatgacagctcatcaatccctcttgatggaagcgccactactagccgagttgcttagaaaattcgaagcgtcaggcccggtgggttctttagtcaaaatccgttccaggtatattttcatatttattatactaattggttatgatcaatagcgacgcatcaacctgtcagaagaggacgttgatgccttcggttgcttcctccagttccaatatacgcgtgattacaccgtggttcaaacggaaacacccggggaaacagttgaagacaaaagcggcgacgagttgctgcgccatgcgcgcatctacacactggcagagaagctaggtctgccaaaacttcagcgcattgcccatggcaagatccataaggtccagagctcacctgatgcggagctttcatatgcccgttacgtatatactcatacaccagcaacagacacgaccattcggaagcctgtggcgacttactgggcgagccaaagccacttgctgcggcaggaggttggggacaactttaagaagctgtgcattgaagtgccggagttttcctttgatgttttgactatcattctggatcgcaagttgaagaacggatcggtggatgagatcaagggaagtgcgcgcaagcgcagaagagacatctagttattgccagttgtacaatcacatatccgaggatcaacgaagtctttttattaatttggtatgaaccttcttgaacagttcaggggcaaatcttgtcaatggccgtagggcctgctttttataaggccaggctctccacctcctcaatgagtttcggggccgtggtcagattctcagaaccgtccttggtgatgtggatgttgtcttcgatgcgcactcctcccacactccaataccgctctaagacctcggtatcgatgtacttaccggtctcgggggcctttaagacgggatcgataatgaagcgacagaaatagatctggtaaataataagtattgggggttgagtaagagggttctcatggggtgtcacttacaccgggctcaacggtgaccacagagccagcaggcaggttagcgcggacacgcaggtagcggaacatggtatccttgtcctcatagttggggttaccaccggtatcatgggtgtccattcccaggtagtgaccgaggccatgcgggaagaaggccacactgacacgcttgtcgaacaattcgtcctcggatccgcgcaggatacccagctttaataagccacggatagcaatgcgatgtgccagcgcgtgaacgtcatcccagcacacaccttccttgagcatcgcaatacattccgtctgcatctggaggacaatctcgtaaatctgacgggtctcgggcgcaaatcttccatttagaggaacaactcgcgtgatatcggcgcagtaagtttggtattcgccgccagcatcgatgagaacattattcttccggcgcttagtgatggggtcgaccaggtcaacatcgtttctgacatagtgaagagtagcacccccctcgcctccagcaacgatagggtggtaagactgctcgcgacacccattggcaatacaagcaccgataatggcagcctcaatctcgcgctcgttagtcgcggttttggaggcctgaatagcagcaatgtgcgctttggtcgagatatcgtttgcctttcgtaaaagcgcaacctcgtacgcatccttgatgacacgagtctcctcgatggcggtcttcaggctggtagtgtttgtttcagcgaagccatggaagcttattccctccgacacctgttcggcgattgcaaaaacagcagtttgtccattgtggtttgaggcgatcgacgccaaagtcgaattcatatcggttgtgaacagaacgcggtccacatcgtacaccttggcagcctcatcgagagacaggggaagaccggaccaaataaccgactctgggttgatcggtggaataaacagagtcaattcatctccgacggcatcgtataccacggcggcattgggcaaaagacatccagtgagatagaagaaaggacgacgttgcctagaccgggattagtgtcagtccagatcctacagaaatgctgcattacctgaatggcatatcctcatcgctatcctcgatcaatcgagttttttgagcctcgaggtagataactccggccccgccatgccgggcctgaagagactcagcgacacgaagagcatgggccttagccggatacttggcagcgagaatggtatccacggtagtcatgtcgagtgaatagtttaagtgatgaagaagaagaagagagatagagagagggagacaaagctgccagctgttatttacaagcagacgaggttacattgcggggcttagaaattatgcggctacttcagggctgccgctgtcaaagggaaaaggaaaaaaaagaccaacacattcacatccgtggagatcatacattatattattcggactcttcatccaatccctctaggactagctctctgaagcagatacatcttcaaactccatctcccattggtccacctccgcaaacttcttgactgccgcgcgcaactcatcgctcacgcaacgagtggcctctgattctgtggattcgaaatcagatatgtcagactcaggtggtgatgacagtggagaagatgatggggatgatagaagcgcttcgttttctttgttgacgccactcgcttgagaacgtgaatacgtagctggttgtttgggacacgatttgtccttaattttcttctctttaatctccttccgcttcggattgcgagcatcggctaatggtttgagcttgctttttcctgcccgtcgcccagataatctttgtgatggatagttcagctcgtcctcgtcgccagatgcggcatcatgctgatcatcactttcgtcactgtaattattggtggcacggagtctgtgccggcgacgtggtaaaagcttgtcttgtaggtttgctgtcgatagataactcggggctttggactttttcgtctgaacaggtcgcggtgtggagtcgccaggtgcaacggagcctgcaggactactggccggtggtaacatagtctggctcaatatttctggaaatctttgggattgtggcgtagcctcgactctttcaatctcagcctcctgatcttcaaattcctcgtcttcaggttcgacgtcctcattttcaggaagttcgtctccaataacatgtcgagagtcatcgtattgaaccggtgtcgcagttggagtatcttctactatatccacaggtgactgtggtatttgaatctcttgggtcatgcgcttgcgcttgcgcgacccgccggacgagagcggggatgcggccggtgacggggatgaattttcggttggctggataagtagtgactttccccgagagagattgagtggtgtcgattcatcattggggctaagcccaccaaggaagtcatcatcatcaaggtcggaagagccatcgtcgtctgcttgcatcatttgcagaatgctttgctgtcgcggccgccgcctgaagttgctcagaaccgaattatcaaatccaggcgttccaggaacccgggagtttgtgtcacctttgcgtccagcgaatgatagcgtagaggaataaccgcgcgatcttgtagggggacgactgccggttccaggtcgactgccggtgcctggccggtcccccgtaggtgaagattcaatcgcttgttcatggcttttagtcaagggtgtttgactgcatggcgcctgtcgcagatccaaggccgaggcacgctcaggctgcacgggcgattgggcgacattggggtcaatttgctgcgttgagtcttctatcgcggtttttttgtgctgactctttcccactgtacgacttcgtttgggggctggacgaggcatagtcgaacaaattgatttgagccaacggagtatgtgatagagccaaaatggttgcgcagctacaaatgcgaaagaagatcgacgcgtttgtttgggcgcggtgcacgtggaccacatgtgacagcaaactcgatacatactatctagtatctagtactccgtaggtcaaacgtacaaagtactgacatatattacttgatatatatttcgtgcaaatgccgattatattctatatctactagcttacttgtgcttttattcgcttacatttttcctatccgatgtgctacggactcaccctcgtaccgagttgggccaactgttatacaagctcggaaaggctggaatacattgtcattggacgacctcgcatatatatcaatacctgtgccctgaattctccgggcaattattttggatatccctctccctctttatgtctatactcatctccaagtatggtctgatgcccgtcatgctgaccaacccctttgggtggaatgcgacgttaaatacaactagacacaatcccagctttgaaaaatgaatttgctcacagagaacgcgacgatagaccccatcggggactatgcagttagcgacatatccatcggcaagaaaaagcgctctaatgcagaagctgttgaatatccaagaagacggacaacaatagctgtaagcgcctctggcacatttgaccaaagcaggactcttcaacaactagtgtcagacatgccggctacgcaatacccgatgtagtggagttcgtgccaaatgtgttccgatttgaatgcggaatgtgtctatcgagaacctggtatcaaactcgacactggcggcaaactcatcctagatcatttggccagaattgagactttattacattcgaatttacaaaatcaagagccacatttagccccgtccgctacttccccggccaccagcaacgatacaaacctcggtagcgatgatccgtcaacgagaacgtcatccagaggcttaccagtccacagaagattatctgctgttgggctcagtccccgggtccgcctacctactcttcatcccctccatttgcctctaattcgggacttggtctctcgcctatgatccacagcatcttcttcaattggagtggcccgcgaactattgcggcttactccaagttcaggcttttattttgaaaatgcatctacatattctcaggcagttttcagctatggaaacgcttggtacgcctgcgtgaacccttagacgtggaatcgatattgtcaatcagctctcgcgcaaagatatcagaaaggacacatgagttgtcttgttcttctagttttggctctaggaagtgccagtcatagtcgcggtatcttgtttctgtcaccagatcgtgaaccgctgggacttccttattttgccgctgcgtggggcttcctactgtcggtcatgatacgaaatactgtggttgcggtgcagcgtcgtcattacctagtgtggctcctggaagcttggatcttactatccagcgtgagtatgaaattgtagttgttgtttggcagtccgaatcggatcccgactcggtggagagagctgagtgtgaaggtatactggaatgccttgttatttgaggacgaccttcttgcagaattagatctcgcccattcgggctttttcgactttggagaactcatggatttgcggggagttttcgaaagaagagaggatgatggagagggggaaggcgtggatcataacgagggcgaagaacgccaaatagccaggaattatcagggttcatcacgcccggtagactcttggctggctctcaagcgtgatggactctggtacttcctggaagagattgggctacaaaggctcctcaatcgcgtcagtcatatcatttatcggaaagacagtgcctacactctcgcctcattaggtccgattgtatccgagctcgactttcagctatctcgatggtatgaccgtcttcccgggcccgttcaattccctttggccctaaatcctctttccaattcggttcaaacggtgctggggcttcgctacaatgcatgccataccattatatattttccatatatcttagctgtgtttgagaatgaacaggctggagtgggtgttgccggtgatgtttggatgctatactccgtcaactagagccatataaccagccatcgagaaggccaccttccggtgccctgtcaatggtatcacagacgttactgataatgggtgccacgatttctcctaccttctctatcctgcaaccccctcccccccgtttcacagatagatgcgatcatggcaggcgtggtaaacgaaatacagaagtatgcacacctaaagatgccagccgagattatccgagatggaaagaaatgacgacaaatttgtcttcgatcggccaatatgtgcttctgaactgctgatgactgatggctgaaagatttactgctcaagaatgatagtgatctttgtatatatgaacgcgaacacagtatgatgcttgtaagtactgaaggattgtagtaaagtgtgatatgcattagagtaagtcgttagggctcgcaccgaggcaagaccaccaaaataaacagtttatatggacaagaaacaaacagcgttaaatacaatcccttctcatgacaattatgttcttaaatcatcaaatataaaatcatggtatctcaaaagacatggggagatcgaatatggacatcagaaatatcaaaaagaacgcagaaaaactccaggtttccagtggctcggaagagggaagagaggggnnnnnnnnnnnnnnnnnnnnnnnnnnnnnnnnnnnnnnnnnnnnnnnnnnnnnnnnnnnnnnnnnnnnnnnnnnnnnnnnnnnnnnnnnnnnnnnnnnnnnnnnnnnnnnnnnnnnnnnnnnnnnnnnnnnnnnnnnnnnnnnnnnnnnnnnnnnnnnnnnnnnnnnnnnnnnnnnnnnnnnnnnnnnnnnnnnnnnnnnnnnnnnnnnnnnnnnnnnnnnnnnnnnnnnnnnnnnnnnnnnnnnnnnnnnnnnnnnnnnnnnnnnnnnnnnnnnnnnnnnnnnnnnnnnnnnnnnnnnnnnnnnnnnnnnnnnnnnnnnnnnnnnnnnnnnnnnnnnnnnnnnnnnnnnnnnnnnnnnnnnnnnnnnnnnnnnnnnngggggggggggggggggggggggggggggggggggggggggggggggggggggtattatcgtatagcttcacatatatcctaaaccaacacccactcgctacctcgcttgatgaacttgtcgagcatcaagcccacatcagccagtgcgaaccgacaaatataaaagccaaagaattctgcagcgtgtcgtgtgcagagttccaggccaacatgggttttggacgaatgtttgagtccagggtcctcaacttgctgagcaatttgttctggtaatgaattagaatgatgtcaaaacatatagacgagaaaggtattacctagcacttgtgcagcatcgaaaagccgcgccaacgcgcccatgtagttcgcgttggggccagaaaattcaagctgggtgacatttcgcttcgcaggtgttccatgtacagatgtcattgggacagaattgaggactagattgtccttgctactttctcgagcactcgggaccggggtggttgtcccaagcccggaagtttttgcgcgtaatcttttccatgtcaaataggacttattcggcgcaacttccggtgggacgggttcgtccggtgtggaagcgggcttgaacaatggcattgatgcttgaataccaacatcactgcccaatttcttagtcaaggtaacctgaacttggtcaagtatagtatcaaacgactgcatctcctccaaaaccgcatctgcatcatatgtatcgacctgggccaatttgagcagggcggcggtcagaagatcgcagttggacactttctcttcgagggcctttaatttaacattcttcacgcgccagacatctcgaggaataaagagcttctctgacagatatccaccgtgaggatgtgcgagtgtctggtagagacacctcattagccaaaatggacggagaaggaaacactccggacatggctctagaggaagcggggcattggctaccaacgaatttggacgaccaagagctgtgggtgagtgaatgttactaccaaatagatttaatccgccacttggcagtccattttggttgaagttgaagttagctagggtcggtgtgggtaaaacagggacgccgctagtggcgcccctttgggtgtcggggaatgcaccgctccacggggagcttggggattccgggcacatatcagggatctgaatcggaacagaggcattccgagctcggaaaggctttgtattggagtggagtttattcaatccatctggagccgagggtactttgcccatgggccgtgctgacagcggcaggggtggcagttcgttctcaccatcttcatgagtacgagatttggagaggttgacgtggtccgtgaaagaacccaccgacggattgcgttgtgttggatgcaaagtggaacgggccccaggagcagaaagttcgtctttcggcaacggtagcgggcgatttgccagtggggttgcaacattttcaaaagccgatgatgcattggaattcgcgcgagaggagcgggtattgatttcgattttaagctcgcgagtctgactggatagtctccgggctcgcactcctggacctgtagaagaggcgagtgagccgatagaaccctcacggtttgataccgaggtccgctttgagggagctggaaagtcggatgatgctggcaggggcggcaaagccgaagaaggaggagaagagggcatggtatatggttcgggccttaggtcgcctagcggcaagacatcgtcttctgccagcgtagacagcacattcccagtgcttgcggagctttcccatgtcctcccagacatgttgctagaatccgattctcgaggaagtgccgacttggactgaatgccaaactcaaagtcatccatcacgtagcccttggtcatctcttctagcaaccgctcctcttcctctgcttcatcgtccagatattccgaagtacgggaaatggggtcatcccacaaagtcgtctgttcctggatgcggcgcatttcacgatcacgattcattgcctctgcttcctgttctgcctcgcgcactctttgcttcgctaattgaatgttcctgcgagcatttgacacaatatcatcacgttcctcttctctatgctctagcaccggctccagaccttcatcatatgcagcttccacggccgcatcgagtgccgcatcaaactcagcttcggtgtcattactgagtcgacggcttgtccggcgacgaaggtacaccgatgacgccttagaattcgccgatgagggtgacgaaccgcccgattcatcaattgtgtccaaccatgaagtggattcattgatgtcctcctgactacccgtcggcaatgtgatagatcggtgttgatcttccaaggcagacggcttcaaggattgtcgccgagggggaatcgcttccatagaaaatccttttgcctcttccagtgggatctgatggagcctaaagctggaacgaggcgagttctgctggctctccatatggaatccgtcatttgtcgaacgaagcaattccccatatgactcttggctgaggggccgatctggaagagctttatcgtcgtcttccgggagaggaaagtccatacgatgaagttctgtgacccggagcatatatgtgtctcggatttcttgaagtttgagtttctcttcgtctcctccattgctacggaccatgacaagctgcagcaagttgcacgcgtcggtgtaagcttccattgcaccctcaaaattagcagcgttgtcaagaagaacggccgtatttgctttctgaagtgcctttgacagcatcaccttttgggtctgtccatgttgtatggccacggcgtccccgtccccgtcatttaaagaaatagatcctccactagatcgagaagttggcatatctggtttagtgctatgtgttgagggctgaaaaagatggcttgaggccgcaaatgagagatcgagttgttgtgatgtcgggtcatggttgaatatggcagacttctccatctccggcaaatcgaacatcggcaacccattcagtgctggcgcacgttgcgggctgtcgctctcccgtccacggttataacctgacatggacattttcgagctccctcgacgatgatgaccgatgtactccgagggacttttgctagatgctgttgactgggaccaacgatttaagctgcctagcccttctttgatagggctggtggctccgaaaccctccggggacatgtttgccacattctctgtaagtacaccgaggccagtgggtgtgaccgcacctggcggctttaccattcgagtccgagaactagatcgtgacgagcgagaggaaggccggttatgggacggtccagacagcggttccgatggaaagggacccgaaggacgtctgaggtaggatggattggggtcatcatcgactgctgtgtggtgaatcattttcgcaagacggtggaatagcggtcgaagtttatcgaatgatttagatgtcggaaatgggatatatcaagtctctctgaaattgtgtagccccgaggcactacgcgcgaccagacaagcacaatatgagagagaaatgggtatatgcaaccgggccctgtgtgtcttcgctcattcttcgcaagtttaaagtgttgatgtggtcgtgtctcgtagagtatgtatccttgcttttgaaaaccccctctccgtctcaatacatagcttcgtaattggaagggctcgaggagtttaaagcagtaggctgaaagacattatttcaattgacctggaacggatcaggaaccatgcgcattgaagatcaggaaccaaactcacaaatcggggaattttcttgcgtcaatcacactcgcaaaatgcgcctcagagcaacaagaatctgtcaaatccgcagaagggcagactaacagttgccacttgtgggggttcgtcaagttcgtcagggaaggggggggggcttgaactacttcagggggggggttcccgggtgccgggcggtggacgaatgagaaaaagcgatgcggggacctcggaaggatacgatgagttctgggagattagaagaagaaatagagaggaataatggatattgaattctggagtctggagtctggactcccaagggagagggaaaaaaggggacacttctccctagcgcaggctatatacatacagggataagctaggttattgtgcataatacagagtagaactaagaaaatatttcaaagttgaaagttggaacgactcgataggtagaaagctaacagacatctaaatacataaatatctaagacaagtgtaaacgcaaatataacccaaatcacgaagttgacgcttagcgacgggaaatggggggaaatggggaaatgagacagatgagaggggagaatttcctccctccaaaaaaacctcatgaatcccaccttgggtcgttctttgactcggaacttgaatcctttccatttagtccgttctataaaagtacaattcacctcaattcgaactatggctactatcaatcctccgcgggatccgaataccgtgagcaactacaacaattggcgttccacccatattacggccaatttcgatattctgttcgatcagaagaagctggtgggaaatgtcgtctatcaattcaagtcaatcaccgatggcgagtcccaggagatcatcctggataccagccatctcgacattggcgcggtgaaggtggatggccagctatccaagtgggagtttcttccccggctagagccctatggtgtgccattgaagattcgccttgatacgcccgtcaagttaaatggtaccgttgaggttgatgtatgtttcataatcattatcctcatgaatctctatctcattcaaatcatagatcgaggtgaaaaccaccgacaagtgcaccgcgttgcagtggctgacacctgcgcaaacttcaaacaagaaacatccatacatgtgtatgtgacaatcttgaactcttcttggagctccattagctgacaaacttgcctagtctcccaatgccaggcaattcacgcgcggtctatcttcccttgtcaggacactccggatgtcaaagccacctttgacttcaacatcacctccccgctcccggtcatcaccagcggcctgccgattcgcaaggagtcaatggagtcaaaggcggaccgccaattgtatcgattcaaccagtcggtgccaatccccagctacctctttgctatcgctagtgggtaaggattcttccaccattctcagaggtacggttcattaatgcagaactccacagtgatgttgtcgaggctccaattgggcctcggagtgtcgttgcaaccagccctgacaagctggaagagtgcaaatgggaactcgaggctgataccgagaacttcatcaaaacaatcgaggtacacagccgatattctattcatatcaatgttcaattctgacattgcacagaaaatcgtctacccttatgcctggggtgaatacaacgttttgatcctgccgcccagtttcccatatggcggcatggagaacccgatcttcactttcgcaaccccgagtatcatctcaaaggtacgtagtatcctctacgcaatagttagatggaccatgattaatagctccctcaggaccgtgagaacatcgatgtcattgcacacgaattggctcacagctggagtggtaacctggttactaatgcctcatgggagcacttttggttgaatgaaggctggacggtttaccttgagagaaggattctggctgcccttcatggcgaagcctaccgccacttttcggccatcattgggtggaagtctctgactgacgctgtcgagcattttggtgacgatcatgagttcacgaagctcatcgttgatctgaagggcaaagatcccgacgacgcattctcaagtgttccctatgagaaggggttcaacttcttatttcaccttgagaatattgttggcaagtcaaaatttgacaagtttattccccacgtacgcaatctctcttctctcgttctgtttcttttattaaccctttcttttgcagtatttcacaacctttaagtgcaaatcactcgactcttatgagttcaaggcactgattctggacttcttcaagtcagatgccgaggcttccaaggtcttgaacgaattggattgggacaagtggttctatgcgccaggtttaccacccaagccaagctttgacacatcgatggtggatgttgtttacgaactttccaagaaatggcagtcccttcccgactcttccttcaagcctcatattagcgatatccagggcttgaccgcaaaccaattggtcgtcttcttagagcagattctcttgctagagagaccactcagccctgaagtctcgaagttgatgggtgatgtctacggtttgaccgagagcagtaatattgaagtttcgcacctctactgccaagttggcatgaaagcaggagacgacagtgttattgagccgacaaccgacttgctgggccgcgttggacggatgaagtttgtgcgacctttgtaagatgtccccgtgttaatcgcagattctgttcttgatactgacttagcattttttcttgttctttaggtaccgcaatctccagaagatcaatcgccctgtcgccctcgcaacattcgagaagaacaaggatttttatcatcctatatgccgagggatggtggagaaggatctgtttggcaagaaagacaactaggtctttttctctatgtcgtgttttactcgaataggtagacatgaatgctcatcggtttgtgtgccgtggtctttggatagtaaaaattgttatacaacaagactagggcaattaaatattgtacatgtctttgtaatcaaatgatataagatagcagaacggataccacaaatgcaaactactcacttctgcgaggatattccatcatttgtttgcttgaacgagtttcttgtccgtctccgagtacgcaaagatgccggtgttcttttggtcacgcccaagagagaaaacaatatccacctcgtccttcttggacagctctgacaagactcggcgcatgtaggccaccacctgcgcaaccttggcccagtcaatttcttctttcccatccggtccggtctgacttcccttccagaggtttctccagacagcagcgcccagcaccgcatcgcctttggccagcccttcatcatatgcagcaatgattccacgccattgaatgaacagatccttcaggtacttgttgcgaatagtgcgactacccagatcatgatatgtgtccatgcggtgttccgcttcatgcgaaaagtgatcgatcaagtggcgggagtaggtagtaacactatcgcgatggggcagggcacgaaggcgaaccgttaagaggtacatgtggaggaaagtcacctgggaccaggtagaaaaggttggcaagaggccgagctctacagcgacgcccgagattagcttattgtcttcaaagcagatcatcgcctaagccagagaccgctcgtatcgtctcacctttataccaccaaccctctccaacaccaagatcttcaccggcttctgttttcgggacctccactcccttttgcgacgcttggggaattttgtaatccgcttggctggaacaggcctcgaatagcttctgtgtcatgccatacgcaacataagtctcggcggcatttccaggtctccgggaaaagttcttggccaagtcggagaccttgccttgcgaatatgatcgagtgatgatcgatttcaatggctgttccgtagacacgcgggaggcggagaccagtgttatcgggctgcgactagcagatctggaaaggcagaggttctggaacccacgaatctcgcgcgcccatagtgttgatactctcttggataacattgctgaggatgtggaattcgtgaattggtctttcgtgattggtgatctggatctttttctgataaagtatgtttgcattgtttgttccgatatcaagacaggaatttaaccttacagtcatgtttcattagtatttaaaccccagtacatcggaaggcctaggacccacttattttcggccggtaggaaacttcacattcaaaaccccttttaggtatacaggtaactagtaactagtatgccacccttcgtacctgatcacctcttctacacggtgtggcatagttactaacttctacgcgtagcgcgcgcgtactggcggggtgtatactagtaggaataggtaggcggtgtaaaaaagcggttagtggtcgaagtaccggggtttaaatattaatgaaacgccactgtagacctccagggttgcgtatctcctaagagagctagttaggtactgctgaatttgattgtatttttacccttgtatgttctcggtggagctcctgctggttattcaattgatggtttagtgctagtatctaacttgagctcttctcactagttaacgtaattcccaagcgagctgcgcagcccaaaatacatagtaaaagcgataaattacaacatgatatctcagcaatgatggtccttaggaacttgtctttatagcatagtactatatatatgatatatagcatgtctagggagctttaggaaaatttatggctttataactgcgatatatatatttctagcttttgggaacgtaattttcggtaatatttgaaatgacagtaagatagtattctactctccttgagattgatatatagtactacagtaatatgtcttatcaataatcatcgacaaatgggggaataggataaacatatggttgttgagatataaatgtagaatgtgtcgcatttactaaatgttctaagctgcgcagctcgcttggaaattacgttagttagttactaatggttaactatgtaatttatcacttgtattcttgtgccagcggcagagtatgcccaagattgcaatatgcgtaagtatctcggagcccctcggttagtgttgcgtgttttttttgcacccttcgttccgcctttcaggacaagagaggttcacggtctacgggtaggtaggtaggatgcgataggtctagtgacatagtaatagggacatatttattacgaagatagttaaggacgctcttatctctccttatcctattataatctgcatcgtttgtatatgtctcgtgaatttaatcattaaatgtggcagtaggtccgtaacctaactagccaagtctaacaaaagactcatgtgggcgaatatgggatatttcattcccaatgctcatgcgtatggtcgtcatgatccagtggcatgtttcgtttgtgggagacgattagttgctaaatggcgaacatcccatgaccgtgacgtctgtatccaagcccaatggttgactgggccccgcggataaccagaatatgaagtgtagatctctcaatcgcctagcaccaaccgctcggatcgcttttctacaagggggagaatctcagagagccggttgggatctctcaagaaagctggaatatcatctctggttgctgctagcatctgtggacgactgtcagatcaaacacacatccaacgttatccaacggccacacatacctgtcgaactttctcatattcacattcctttgagagatattctcgaataacttcacctgtggcaaagtccacataaactcgagtgtcccggagtcggatcaaaacgtgatcaagcctcatgaagaatcttgtcaatagaagaagtcttcctggcatgactcggatcttgcaagacagcatggtaatcccattgtccgccagctcatcttcataaagaacaacctcgtcaaaaaagaggatgggatctggacgcttcaatagttcaatcggaatgggcttcgtcgttggctcaaacggccgcgcattgggatggagggtgcccttgtagtcggtgctatatgaccagtcgaacggcttcacgacttctttaatcccttcgtgtgttttctctctgcggaacaagccattagtcgcaacgatcgataagcagaaatttagacggctgcaaaaatacctgctcttttgccattctcccgagtacgcgacctggagcatggattgaccagtcttgtccaccaagtccaaggcatcaaacgcattgaaattgatgccccaattaccattctcgtgctctattgcaacataattatcaccaaagatcatttctgggggtgcaatgccgagtttctgggtcatttcctcgatcgggtcggctttgagaataggtagcttctgtgttgaaattcgaaacccgttgatggtgatcgaatttggtttctttgcctccggagagaccgtgacacatgctgtcgtcattgctaaatcttcacaagaagcagcgagagatcaaaaacagctgagccagtttgcagtgctgatggcgataaccccgcggacggagaaagaggcggtccgaccctgcaataatatttgttcggcagaatcttgaaagctttgatttggtcaatgggtctgccattttcaagtctttcataggtagtatcccactgcattcagaatgctgtatttgaataaaaccctgacatggttgtcgtcacctcaagctgcaaaataaagatactcttcgagcatacgattggtacggaaatatgtgtaggcgccgagagcggacaggatggcggtgtgatagccctgtacgtatattacatcagccgggcgttgctggggtgacacgttctgggaatcgcccaaacacccgagcttctgtttctccattttgcgatatcctccatccaccaacgactgacttcgtgcaaagtgatcatgattgctctgaactaagcctaaactcaattttggctacttattatacaaccctctttttcccatctcttattttcacctctcctatccaccctcccaccctctcaccatggcaacgaccaagacgctcgaagctcgctttgagcatctgtccatgaaagacgagaaagagaatggaaatagtgatcgaagctatggcaagcagaaggtacttggctcaacgcaatctggttggagatccaccttgctgatctgatttaccaaggtcccggtttcttcagcccagtcaaacagcaattcaaaccgagctcagctactgaaattggctcttcaaaataataatgaaaacaaggcgaatgccatgaacgttgcagcctcgccaggcaagggatctcacggcgcattggtgacccggagcaccgatgaaaacggcgaccagcgcagatcttcttccctctgcgagcagccaactgtggccaaggagctgcacttgggaatgtttgaaattggtaaaccactaggcaagggcaagtttggacgagtttatcttgctaaagaacgttcctctggcttcgtctgtgcactgaaggtgctacacaagtctgagttacaacagggtggtgtccagaagcaagtcagacgtgaaatcgaaattcagagtaacctgcgtcaccctaatgtcttgaggctctatggtcacttccatgacagcaaacgaatcttcttgatcctcgagtttgctggccgtggtgagctatataagcaccttcgcaaggagcatcggttcccggagtggaaggccgcacaatatattgcacagatggctgcagctttgaaatacctacacaaaaagcacatcatgcaccgcgatattaagcctgagaacatccttgttggcattcacggggaaattaaaatcagtgatttcggctggagtgttcatgcccccaacaaccgacgccaaacgatgtgtggaactctcgactacttgcccccggaaatggttaatcctggctccaaggacaactactacagcgagaaagtggatttgtggagtctgggcgtcttgacttatgagtttttggtcggcgaggctccattcgaggatactcctatcatgacccatcggcgtattggcagggcagatatgtcggttccctccttcgtgagcccagaggcaaaggaccttatcaaaagggttggtatatctttctccattatctatggcccgcatactcacatattatctagcttcttgttcttgatcccgcgaagcgaatcccgctcgaggagatccagcgccatccttggatcctcaagcactgtgtcaaagacgatcgagctgtgaagcggagttctgcttcttccaaggagggcaaagcatgaaacctgactttgacctttacatggtagactttgggggttctagtttctttttgatatttcctcatgtggagttttggtgtctgagcctcatgcattttcaaggcgtgttagattgtcttggagtccagctgaagaggtactctcgatatggcgatattttgatcttaattttattctccgacgtgttcaatacaacatggcacattcaaacaattccacaagaagccacggatacctatgctctctgagatatttgcatctataaccaggacggaggacggagaatactatcggactggatctgtagttgtgttcttagacttcattgacaatcaccatcatagaccaggtatattttgatctcatctcacctttagtgctctcaatcacatgatacatacataaccttacatattttaacaagtaacaaatccgaaaagaaccccggtagatgggcgggaaggtttgtgtcgctagtgaaactcatgaaatatagtacatccagacaatatctatcatacaaagggcgagaatagtacaacgctgcataggctgcgtggtatcatcgatagatctcatcaaatgggcgtgtgtctctgaaacaactatcccaaacttcattgacgacccttgtggcatgggcttcgtctttacaagttgggcgtgctcgcacagagagaatggctctccgtcggacgcattcttggtgctgttgtgtaagcttccactgacctcttcggaaaaattcgcgcgcccatctgcattcgccgctgagcgaactagctcgaatctaaacggatttagcgaatctcggcaatttaagaagggttaagaagacaagaatgacacatacctcggtacaagcggcatgccgaagattatcagaccaattcaccttgaacctgaggtgatcaaaggcatgaaccatctcatgggccatggtatcttcgaggtgtccctggtccttcatttcatttgcgcagatcaggattccatattccggatcgaagccaccacccttccgatcagtgcaacgacgacagtagatgttatgattgtcaagatcgcctcctaattgttgaatgctttcgctgagaaatcgaatcgtagggccttaataaatcgaccatgtcagtatccagctagataactcttagacaagggactcactatattgaagaaggtaatcccgctgatcctcacagcgcttgcagtctgcttcttcattgcgagtgtctcgcgcaacacggaactgctcgattgcttcgttggacatcttgcccgtgagaatcgaatagatattgcggaattgggtccaggtgtcatcaccgggaagaaaccctgtagtttccggctttccattggaaggtgcagccgcacctggcgactgggagtctgtcattttcgatcgtggacttgtggagagtcacccatcactccgcgcgataaatcgagatcctccgcaaatggcggtagtgtacggcagaatcagcaccggaatctggcaaaatgggctcttccgtgattcatcaccgcggggcccacaacacaaccggcctttccaattcttttcgtttgtttcttatttgtttatttgttactgggggttttattggaactggaatttgcgctatggtgacctcatccagcctcacaatcgtgatcaaattgggtgcggggatctatatctgttgtccgatgactcaagtactgaccactcgatatatcaggaacgagttcgattgttgacgagaaaacccacgagcccatactttcgatcttgacattgatcgtcgaaacggtgaccaagctacacagagatggccaccgggttgtccttgtatcatctggtgccgtgggggttggtctgcgaaggatgaatgtagacaaaagaccaacatatcttccacgcatacaagtatgtcttcgattctacaggaatacaagcccatataatatgtctaatggaaaagttgctaatgaaatctgtaggctctcgctgcagttggccaatgtcgattgatgagtctttgggataatctattctcgcatcttcgtgtccctgtggctcagattctgttgacaagaaatgatattgctgatgtatgtacccttatacctgcctagccctgttcctccactgacactcattacagagaacccaatatgtcaatgcgcaaaatacattcggacagttgtttgatatgggagtgattcctattgtcaatgaaaatgataccctggctgtttctgtaagtaagttccccttcgagtcgcgatctcgcatctgacccaatcatttccaggaaatcaaatttggcgacaacgataccctttctgcaattactgcggcaatgatcaaggccgactatctgtttttaatgaccgatgtcgactgtctttattcagccaaccctcgaaccaacccagatgcaaaacccatcgaggtggtgaccaatatatcctctctcgaggctgacgtctcatcagcaggctcctctctcggcactggaggtatgagcacgaagattgtggctgcaaagcttggaaccagtgctggcgtcactacagttatcaccaagagctcaaaaccaggcaacgttcatgatattgtgaaatatctacaatacctcgaggctcggtcaaatggcgtagcagctgacgaccaaagtgaggcacccactgcccctctacatacccgattcatccgttcagataccccgattcaatcacggacattctggctacttcatggactgtacccacatggtacattatacatcgaccacggagcttaccacgcactcttgaataatgccaatcttctcccggctggagtcgtcggggttgaaggccattttggacagcaagaatctgtgcggctagtggttgttgatcggccatccccagatgccttgaatggcgattttatccatcacagagaggaacctaaggaagtcggtcgcgctctggttaactacggaagtattgaaatcacacacattaagggccaccgcagcacacagattgagacgctacttggctatgccgatagcgactgtgtggcaatgcgagagaacatctcgttccaccccgaggaccacaaacataccgtaacaccgtcactaacaccggccttggaggaatggaagtccccggaggcataatgttggcccatccggtacatgcatatcatgaacagaagcgagaatcttcttgcattcaaaggcattgatggtcgatattcccagtcaaacctgatcgtttcaatataaaagttactcgggatatataggccgacaatttgaaagcccccaaagcatgaaatgacctccaaaacagcatgaatgaaagcacttgaaaattgaatgtttatacgtcaattcaagtgccatgtaaagatatgagaaaacaaaaatgtcaagatgcctgaaagcctatcaatcattccaacggtccaaccacttctgcattctcttgtccaatgtgggcgcaggagcgggcgcagcctgaacacaaacggaggattagctttcaaacccaatcgacaacaagcaagaatcaaactcaccgtgttctcgatggtgttcgccgtccatgtcgcaaaagctgtatccgtgtactggatggttggcgcacctaagtagctggttgcaatagagaacgggaaaggcgggtattgaggagtggctgatctggtggcgacagtagtcccagcgctcttaggcatcggggcatatttgatcgagccagtctgttcaccgtatgggacggtatgctggtcaactacagaaacatcgccaacgccgccgacagcagccacttgtcgtttgcgcaattcattgtgctcggcttcgcccttggcggttgaggttgggaactgcaaggtggcttcggttgaggaactcttggcgagactagaggagttgcaaattgaagtgagatctgcggcctcgatgaggtggtcatcgtctttgactgtaggccaggaaataacgacggcgggaatcggctgcatcgtcttgatcgcatttgttactttggtcgagaatgtacctttcatgttggtcaaagtgaaatgagaggtgaacccggaccagtagttatgagggcctgataggactatcttgagaaagctgattgggccccagggacattggtcagtcacaaagcgaattgatgaagccgccgatgtcagaggcaaatgaattgtcttactatgcattgggttcattcccaccgacactttgatcgacacgaaatgacaccatgtcaccaggagcataggcgccattgttgataacttgcgatagagtgtcctagatgtgtggttagctctatgttttgcagttccgtatagagagaaacatacatatgaacctgttgtctcatcaccggcacagagataaaaattataagttgaagttggttcgccatctaagccccaaagcagactcacgacagctgcaccgtcgaaactcagatcatatgttgtgatctgagaactgatctggccatagacggccgtgaataacagggcgacctgaagtaattggactctcatggctgatatgattgagaagcacaagtctcgaaagaacagagagttgtctcccagtcaagagagagggaaatcaccccttcatagggtggtctggtatgtgcatcattcctaaggcccttgagccctcgagggtttgttttctatagacccgtgatgtgcactaagataagtggatgggtccgtgctatcgggcttctcctgtcaaggtgtcagcccacaacttttgacaacttccaaacttataaccgacaggatgtcgtctcaagcaaattggaactcggtgactggcatagctacactattgttcgatggcaaccttgtcgccattgctatcgctgtcctattcacctttggtgtcccgatcgcactgcatatcttcttcttccagaccgtagcttctccgccctcgagtaatttcctactcctaggccccagtggagctggtaaaactgcttttacgaccttggtaggttgcagtctatgacctgagagtggctaagttctcgctaaccaatctatagctcgaggccaagtcctcgcttgcttcaaacaagtcacacagcacccacacctcccaagaatcaaccttagtaaccgtgaccttaccaccgactgtcccaactggatccaaccgctaccgatcagtgaacgatccctccttgaaggaggccgtccggaatccaatcaagtaccgcataagggatacccctggccatggcaagctccgcgtatcgcaaggaatctccgagctccagaccatgtcccggtcaaaggatatcaagacaaggctacgcggtgtggtgttcatggtcgataccgctgctctagttgacgaagtaacgctccgtgataccgcaacctatcttcacgacgttctcctctttctccagaagcgcgcaaagaacggatcatctagcaagcgaaccactgatgtccctgtcttagtcgccgcgaacaagcaggatctattcactgcattgccgccgggcgcagtgagggaaaagctggaagcggagattgatcgcatccgcacgtcgaagactaagggtcttctggatgcaagtgcggatactgggttggaagatgaagaggaagaaattttgggtaatgatgaacaggagactttcagcttcaagcttctggagcacgaggtcggtgtcaaggttgacgtggttggtggtgctgtcaagggtgactcacaagaagagttcggatctggagtgcgccgctgggaggagtgggttggtatgtgcttgtgagcgagatgactttttgctttcttgtcttgatggtccggaatagtaaatatgtggtcctatcatagtttacttgtatatgttatgccagaaaagaaaagttgcactgagaagattctagactacaatgtgctttttccattgatattgctaatctaatcctagtgtctcggtagcttgggcatcaatccaatcctgtatggtcaatgatataatataacggcgtgaagtaaacatagcactcacccacaaatctcgagcaagtttcatatttccagatatcgcgctgggctcacactgcgtggcgataggcataaaataccgaccgcgatgattttgctcctgcacctctcgactagtcgcaagatataagcccgtggcagcaccatcctccagactttgacccagccacgatcctgccgttcttataagccaacccaggaatctcccaaaataaaactcgcacccgagctattgatcagtgacgatattgcccggaaagaacgaattgacatagatctgctggctcgctagatcttgatcctcctgaagtcgccgactgagctctttggcaaagaggatattacccaactttgatcggccataccgccatactccatcgtacaaggcgggccacttgacgcgtgacgatgagaatagaagatccagatcgagcttctggcaccaacaatggaacgatgagctggtcacgacaattcgtacgtcgttgctaggcgtcacgctgttcttcaacagtggtaggagtaatgtggctaggacttggtgtccggcgcagtttgtcgcgaatacacgctcgatattctaagatgaacgcttgttatcattttgaacactgatggcttcatttaagggaggtaggtcaatatgtaatgattcagtcgagatggagagatagagagagaagtcacctgcattgcaaatcagtatatgaatccgatctgtgacttgttttatcttctcaatcgcggccttgacatcctgaatatcgcccagatcacatttgacaaatcattctccagggagaggcctttgcggtgcctccattccccacgagcagtgatatatctgtcttcacttctggcaacgatgattactttctctatctcgtgcaagagaagctgagttgtgatctctgtattctcgttattataccctacaggatattcaactggctagaggtcaaggaatctgcttaccttttccaatgcccgcttggccaccctggggaacttggttgctgggctgagatataacgagaggactcactgtcactacagccacccgtccatttaacggcgttatgtcttccagggagaagttccgataagtaaatattactgtcatctttggggggtggaatcgacaaagtcgagaggatccccagatgaagtcgcacatacatctctgatctgaaccgacgtcatcgccacctaaaccgaacagacttgaaaaagaaccatgtgtatattctctatggcgtgcattaagtattgatcacattaaacgccagtctctgcgctgcacggtctaggtatttcaatcccacaatgtgttgaatcccattggggagccttcatgccaacgcaacagaaacgcctgttcccagatatcaatgttcaggaatgttgaacccctacccaacaagcaatgtctcatgcgaatgcatttcagaaaataaacaaaggaaacattttaggccttgtccgtcttggactggtgcagcatccaagtgagcaggtcgaccttggtaacgatggccaatggcttcatcgcaccactttcgtccttctcggtcacaactgcagcgctattccactcgaagaagcggttcaggacgctgagaggggtatccatggtgatctcgatgaagccacgactccgggtctgaggcttgaaggagtctagggccttggagaaatcacggggatcggtgactacctcggaaatttttgagaagtcaaacatgacctcagagacggggctctggcctgaggcccggccgtgcgtcagtcggctgagaacgttgcccagcgtgaccagaccgacgagcttacgtccggagggggcaaggactggaagctgatcaaagcctcggtcgcgcatgacctcgatggcagtctcgcaaggggagttggctgtcacggtggtgatgggcttcaagcgcaaggagctgaccttggcattggccagagggtcagacacaggcacatgagtttgagttgtcgatgcaacggcgggaagcgacgggagtagatcgttggcggcgagccagtcgtcatcggcgaacttgaatcggttagcttgaatggaagatcaatcaggaaaaaaattgttccgaccttggagaggtaacttctgatgctgtcgggaagaatcacaacgatgacatcgtccttggagaactttttggcctcgttagccttgaccagagccgcaattgcactaccactgctaccgccgaccagcagaccctcctcggcgatcagacgccgggagtacttgaaagactccttatcttcagtcttgatccaatgggtaacggcattttggtccagaacctcggggatgaaatcgtatccaataccctcaaccttgtaaggttcattggcacgagcttcgttgagggagggaggcagagcgagaatagaaccatatggatcggcggcgatcacgtcaatatcggggttgtgcttccgcaggccacgagcaagaccggtgattgtaccaccggttccagcaccagcgacaatagcattgattttaccattggtctgggtccagatttcctcggcagtgccaagctcgtgtgccaaggggttgttcgggttctcgtactgatccaagatgtgggcgttgggcaattccttctcgaggcgtctagcgacgccgatatgcgattcgggcgagtcaaaggcggcttcgttgggggttcggatgatagtcgcattcaaggcacgcaggacagcgactttctcggcggacatcttctctgggagagtgatgatggtcttgtagcctgagtagagaaagaatggacacaattaagacggatctgacaagtaaagcttatacaataaatacatacccttgacggcagcaaccagtgccagaccaataccactaatgaatctcaattagcgtccgcgcccatgaccgctcgaagcgaaagagaaggaaggaaaagacctacgtgttgccactggtgggttcaatgagagtatcaccaggcttgatgcgaccagttcgctcagcctcttcaatcatacgtagggcaattcgatccttaacactgccgccggcattgaagtactccaacttggcgtagacagtagcatcgattcccagggtgcggggcagatggttcagccgtacaaggggtgtgttgccgatctgctgggtgatagtgtccaaagtgaccggcggggcgccgggggtagtggtagaagccatgatgtatgagttgtgatagagagaatgtagcaaagaagaagttcacaagtcgaagatttcgccatcgacttttgtgccccgcccgatggtagccggctttctctatgtgggcccatatatctatggactttgtttacttttgatattgagtgttataaggtcataggttataggtttataggttggtgtgtgttatatataggtattagctgatgggttgatctatttaccaatagctcatataatgaatgtcaatggtatacattaaaaagtccagaggattatttctataaaacccctaagcctaacatgaaaaggatcagactataattcagactacatactagatatgtattaacattataacgttagatcaagagtgcagttgaggcgagaatttctattgaaaaaaacatatatactgtactccgtaattgaaaaagacgttgagaagaccaaacacatgacgaggccgaatttgtcagtctactcctcgacttcgggagttcaccagctttctctctttgacaacctccaaaacagagatccactggtctcactaactctcgctaaaaacctattacttctgctaactcctgcttggccaaccttaagagctagggcgatctctacccaccaccaatggttgattggctaataatcacctaaagggtcatgttgatagatcaagctcgacaagctcctacagcacgcatatcattgcccgattccataccaactgtccatacttgactagatcattcgcgcttaaatacgacgcttttacaaagccaaggccgtggctgtgcagaaaaatggccattccccacacactcaaatgacaattcatcccctgagagacaaaaggactgaatgcgaatattatacagaacgccaataatctggacaagagagcgagtatgtccaggaagccgagtatattatggtagtacaactgagttcgtcgtcaattcattttatctactcttcttctctagtcaaatcgcgacacgggatacggcgatcttcacgggaaaggcatcatggaacacatcgtggctgcgccaagacctcctggctatccatattgaaagactcgagggctgattggctctgtcaagtgccagcgcatccgactgttgtttttatttgcctcctttatactccgaactccatattgtattgcggcccaggcgctgtatagtctttgcagtccccagcccatcttgcatttttgttttcttctttttgtctatttcagcgtggtttcttctagaatttaccgagtttggtccatctcttatttgattttgtctcacggtctgatattttgcgtgtgcttcatccaattccccccgagctctccgatctctccaatctatacggagttgttgttggttaaaaatgggctcaatcaggtcgacacattcacaaaacgccgatccccgtctccgtgggaacagtgaacagccgaagacggtccaggagaagggctcccagaactcgatattgcccaccaactctaccacttccaagcgagcatgggccttatttcgcgtggacacagctggagagagtggtcgaagcggcattcaaccatggcatctcctcaaggtatgctttaggagtgtctgtacgctctcgatggtcgtgaatatcctctggccatttgtccccgccgcaattgtcattcatttcgcgcgacccgatcttcacgtctggatcttcagtctcaattatatcgccatggtgccctcggcaaacctgctcggctttgctggcggggagctagctaaaaagttaccaaagatgataggcatcattgtggaaacaactttgggcgctgtggtggaactcgtgctatttatggttttgttgtataaccatggccggaccgaaaactcggatctgattcctgtcatccaggccgctattcttggttcaatcatggcaaatctcctgctttgcttgggcatgtgtttctttgtcggcggtatcaagcgtcatgagcagaccttccacgaagccattagtgaagtcggtactgggttgctccttgtcgccggtttcggtctgttgattccgagtgcgttctactccacgttgcgtggaagcgtcaatgcacagtttactctggtgcagttgaacgaatatgccttgacgattagccgtgccactgcggtgatccttctcgtagcgtttttgacgtgagtggcctaggctcttgcctataatttaaccactaaactctgggatagatatctttttttcaacctacacagtcacaactccattttcgatgatatcctagagaaagacgaacaccgcgacgaagaccgacacgaagaagccgcgagggcaaagcttacaatgatagaatgcttccttgtcatcgccgttgcactgacctgcgtctgcatgtccgctgtcttcctagtccaagaaatcgagtacatcgtggagcgcggcgtctcagataatttcctcggtttaattcttgtccctctggtggaaaaggccgctgagcatcttacagccatcgatgaagcctgggacaaccagatcaactttgcactcttccactgcctggctccttcgatccaaacagcactgctgaacgcaccgcttactgtcattgttggttggggtatgggcaagaatatgagcttgaacttcgagatcttcatggttgtccttctcgtgctttcgattctggtcgttgggaatttcttgcgtgatggcaagtccaattaccttgaaggtgctctttgtgtgctggtttacttcatcgtcgctgtttgcacttggtactatcccccggtgcacataacctcgaccaaccagtcttgaatgtcgggtagtttctaagcgtttttggtccgcggatattttgcatactgtatatcactcgtggttggtgtttttgaagagtttgatagagggggggggggactaaagctccattagatggtcagagtaaataatgtctgaacatcagacagcacctaactagtcagataaggccacataatgttatatgacctcatatgagacaaaaacagtatgatctgaccggtcattattccagggttgtctgaggacgcaaggcttcgttcatcaacatctgcgcatcaacacgcagctcaaagtcggccaggaaacaaaagctgatctcgagtttcgacaattcctgcgcactgactccaccgaccttcgcaacccggctatgcggatagctcaagtcctctagagcctttgaagcaaccgaaacaccagcaagcacaagcctgtgcatattcttgggcaggacccttaatacattatcgaccagcgtcatcttggatatatatacgctagctgcgagatagaccgcagtagacataggacagtacctatgcaaacgaagcagatactcgttcaacggaatcggtggcaccttctttgacaggaacttcttcgccaagatagccatctgaatcgcttcttccgtcgccttggcggggtcgacaggatcatctgaatccttaacatgcaatccgacgattttcaccttgagctcatcctcaacaggggtatcagaaactagagtcgcggaaccatgcgtatgcagctcatcggggctgatgggtttctgagcaaagtaagcgcctagccgctcaacattcaaacaaagcaagtgtaatgcagcctcgggcgaaatatcaaacacggcggcgggggtctgtgacgaatcaggatcgtcggcaggttggtgacggtcaatattatccaacggcgagccgagttttagcatggttggcgcggggtttgcgttttgcttggaatctgtgtcttgggacacggacatggttgtggtttgcgttacggcggtggccatggtgtgcgcgtatggattgctgtcactgccacgcgcaggcgcgggcttgatagggggttgcgagtagcgcgcacctggaccttgaggtggatggtagctctctggctgggtatctcattttccaatgagtggtttctggcctctgtagggacttgggttcacttcctggcgaatcccagaatcgatcacgggggagtcgggagagttgatgtgatatgatcgatgatgttccctttttgtagagttgtatagcggggtgagagtggtaagttgtttggatctctatgcggaatgagaagttgaccaccaatttccaatctaaatgttcagctcaccttgaaacctgatacatatatctgtgaataaaaaccgaatcaagtatcgagttaaattgaattgagttgaattaaaatcaaaacaaatgaacttaagtcgagaaataaggagaacaaggcaaaaggggaggataagaaagtcgccacatgtgaccttcaccttggaatccatggactatacaaaacaaaggtacaacttgagaatcatcacatttcccaaccaggagaataaaacgaaaacaaaccccctatctatatatttaactagactccatacaaaaaaaaaaggctcagcaactcccgatacctgtctcttctttttttccagcagactatgagcctcctactcccgacacaagacgcgatcacatatcctagcagactcttgagtcttatgccgggattagggggtaaaaaataaacaaggtcaaatccggattaaacccatacttctgtttgaaaatggaaggaaagacagcctcagcaagggaagcagtttatccacgaatatctgcgaatgtctcgacatgctgggtcacaaatgcgagacataacgcggccagggcaaccgaatgctcggttttagaacaagacgcatggcgctcgtctgcgttgtccaaggacacgtcgacccgaacccgacatttcctgcaatccacgcttaacgggacccggttcgtctgtttcgtaccggctactagcagggtttgagtcccaggtattctgggaccgtgggccccacaagggaccctgtgccggagacctgtattcatattcgtggcctcgtgaggaactccgtgaagacgatctcggttcatactcgtaaccagagtcatcgaaccgaacgtttttttgtgttctgttgtaccgaggctgccgcgtcgacagccgcacatttgaatcatatctccttctagcaaaattagaggccatttcatagtccgggggatcaaccacaaagagcctgggataagctggcggtgcataccgagaactgaagttgccaacaggctctgatctgtaagttggataggaaggccggtacttcatatctatcgagtgtaggtatgtgcgctgccgtgttaactatcttgaattagcttcttgttctcgatactcggtggaacccaatgatataactcgagggcagtggagtgctaataaatgattcatgaacaatgcatctggagacaaagacatccttgagcaagggagttgttgaaggaacatggcagagaaatgaatggagatcgacgaacctcgttgattacagcagcacgcgcgaattgccgggcacagtatgcgtaagaggacatgtgaacaatggcaaagcagattcctttcaaagagtaaagatagagaagtattgatatatttggatcgagacaaagaagactggacaaagcaagatcgtttgatatggattaaaaacaaagatctttatggcgagatattgtgttgattttatattaaagcattttgacaatgaacagggatttgaaggcaacatctgctcgaagagaggggacctataatgaagttattaaatgttgatattttctgtctccaaataaagaatgactgatacaaacctgaggtcaccagggcgcaggtcaacgagtcagcggctttgaaggccagttgcccggtgacaagattcgttgaaattcgacaaattccctccaacctcttccatcacaccagaaatgtggattttgggagtttcatctccgaaaagaggtcctatatcaagaagtgatatagtgtgattagcagggtgttccaaagtgaggcccaacttgaggagcggcaagatacaacggaacgcctgttattgtccatatcataaccaacaccgactattcggggaatagtgtccaatgccttgtacaatggctggcattactgcctagaatattcactgcgcaacattatccaggggttttaaagtcacggggaagggatccttcagccacacgccaccaagcgtcaaatcagaggtcaaatcactttggcgctaaaagaacccaacggcgattaagagccaaccattgacaccttcgacaatgagatcagacaatatttcatgcatgaacgctcagatccataaaaacaatggaaccgtgaagaaaaaaaaaggaacttggcttgggcagtaaagcttcgccacgattcctatgtccacctctcaattaatcgagcttgattgctatcacggtggtggagaacatccaaattgagcttttgagccccattttgaagactcgcgagttctttctcgaggcttgagagcgctgactcctccgaaggatcgcgcagtgatgtttcatagtgagagttggcgtgcaatgagtaacgaagaagctgggatgcattatccaacggtgccaaataagtcagcagaggagcgtccaccgctatattaagaccgtgcagtgtttcggaaatgtgataacgcttctcgtggaggtcaccaacccctccattctcgcgcggatggaggattgattccggtggtacaccaacacgcctcagaagtctttcgagtgacggttgggcaactacaggcgcagtgggcgtgcggggggcaagaaggaagcctggctgtaacgatcggcgtcgcagagactctcgtcgggatgatggctgtgtgacgagttcgctgcctgcttcggattgatataacgcggctagctgttctaatagttccgaggacgactcccggactccgagttggtttgtaagatcttgcttcgacaaagtcatttcgatcaacatgtcgagtgcctagaagtatgaattagttcattgctggtcactgacactgccgaggtagagcctcatacccgttctagtttctcctgcgacaccactcgcagctgatcatgctcgttctggagttcacggaggataggctcatggaactgctgcctggtcgacatttctgccaagatttcgatctccggatacagagactctatttcttcctcgagggcagtgttcgttgcctcatacgttgcgtcggaatttgaaccgcctccgtgaattgtttccagatataatcgatctagacggtagtgtatttcctccgccacgtagcctgagagcatcgcactgagatgatttgtgcgcttgaccgtagatgcatcgtttccacgatacttgatattagacatgagcgtttccagattcgcgagcgccttgtcgtcctgctttaaccgggtagacagagaagcgagtattctcttgctttccgcgcccgacttatccgttgcggtcctgaattcagcctccaactcaccgacaagctcgattgcctacgtagagtcaggatcagcaacacgcgacggttggttgtgacgggcatgcccctaccgccatggtagtattttgtctccccgcttcatgtttcttttgcagccgagtgatatctcggctccgctgcagctccacattgttttccagacctaattgcttgttgagacttgcacattggagcttcaaagcttcggtctgcttttgaattgttgccgttgaggcttcaagggactcgatggcgttgcggagttcgtcttcgaggataggccgtgttgcgccgagatctgggttgctgataataggctgaagagcgccggagtttacaagcttaatatatctgtttccagttagttccgtcttctgactgatggtgcaaataagacgtacaacgcgagctcatcttttgatagcagggtgtctggacggagatgcttggccgcccattgcgcgttcctgtcatcctcaaatgacgactcaatcacctcccgcttggctgggatatctcgatccttgaaaattgatatgagtttgtcggtcaaagtgtcttccattgttggcttgaggagttgtgatgcgaagacctgataaacaaggagctctgagagtggagctccgatttctcttggagtcctttgttgagaccaacactctcctaggtatatctccacaatactcttactgatgcataatttatctttattatgaataacttttctagtaggagctatagaattatattctgtatgaattcagaagtctttagtcgaatcctttaggatataagccgattaaagagataaaatgatggatatagtttgaaggaacctctgttcctttgggactattatatatatctctctctttcagcccttgtttgtccttggataaaagacatttcatttcagcaggcaacaaatcttgaacgctcgagtataaaataggttcatcccacagggttctgaatgtatcgccatcgactcgagctatccaactaaatatttctaaattgaccccttaacactaaaatcagtaagcatctcttgtactaaccaccatcatggatgcaacaactctgcaggccgcgcgagaatttttcgccgactcgcgagatgatttcgtcgtatatatccaggaactttctgccggagatatctcagatcagggcgccgctgcaatccaaaccgagcttcgtcgtatagcccacacactctctggatggatggagcttcgagatgatcccaacggaatgagttgcagctatttttcagagcggtgctgcaacctctcagatattgttgtagaagtcgctgagatggtcactatcaaggacggacagctccctcccacagttatgaagatgttcggtatgctggctatacacttaggacgacttaatctgaacggccatcgcgaagaggacaagtatgcgcggggctttgatcgcatggccaaggatgaagatcgtagatggcagattggatcccagggaccggatgatggtagagctgaacttcttttgggcttgtggactcgtatgaatcggatttcagagcctggtcccaattgtacgttcgagtgcctgcgtgcacatgcgggttctcacattttataggtcgatgagtataacgacgagggtataaagatcggcagagcaacggagaaaagaggccgagactcaaaatgcggctgcctgtggctgagtaatcaggcaaaaaagggagcaatcaaacgtggatgtcaagaacaagacaggaatatattagaactgtttcaatttcatcgagtacagcgtacaaaatactacggagtaggcacagtataagtgtacctgcgacgtgtctctcaattagcgtctccgcaaattcgagtccgcctttttgaccctcaccaatctgtttaccattaccattcattcaccactcaccacttaccgttacctttgaccatctctacaacttccgagctgcgcttcttgaaaacttccccactcagtggatgcgccggcgacggaaccgcgatgttcctttagactaccgccgtctcaaaacaatccagtcctcgaatcgagtccctttccagcccccgggtggcattcgatacatattcaacagtagacaacccgaaaatgtctgccaagccctctttagaatcccttggccccagccatggccagacctccggttccactttcgcctcgaatggcaacgggacagctattcctccaaacgacgtggagatgaagagcttgcgccctgatccccctaagggctcaattcctctgggggaggatatcatgcagttggctcggatgggggaagttggcactatgcagaaactgttcacagccaaaaagttcaccgcaaactaccgtgatgaggaaggaattacaccgctgcatgtttgttacaatctagcgcaacaaacaatagggatctgtttactgaccgcattctctctttctagtgggcggcaatcaacaatcaatatgcgatgtgtaaattcctgatcgactccggagccgacgtcaacgccaaaggaggagagtcggtggcaacaccagccatgtgggccgcccaacggtgtcattattatattgtgaacttattgctccagaatggaggggatcctctcctgacggacgtccaaggatataacatcctacacctcgcgaccatcgacggcaacgcgttcctagtcgtgctgcttttacaccaggagatccccgtggacgttgttgaccaacaagggcatactggactgatgtgggctgcatataaggggtatcctgcatgtgtagacttgttcctgcgatggggcgcaaacgcaaacgccgtggacgaaggtggcttgacgccgctccattgggcgctggttaagggctcgatgccttgtgtcctgaagttgctcgaatacggcaccgaccgctttgcaaagacccgcgatggaaaatcacctgcgactgtggcgcaggaaatgaacaccctgcgggtttggtaccactcgctcaacgagcgcggctttgaacccgatggcacccaaaaagtggtgccactgggcctttccagcttcgtacgcagcaagagcatcatggccaagttcttcttcctttggccttttttgatgatcctgattaccatttggatgctcagtagcctggcgattttcatcgctgtgcccctcgtgttagttactgtcttcgggatgcagtatgttgcacagcaatttgcgaacaaggggcccatggaataccgcgttcttcaaaaaacaccgtatctagctggtgtctttgctggcacattgttctgggttggcttccgctatgtcttcaaggtgctgccggcaacatactcatcgtcgccgattctgaacatcttgttcgcagtcttcttctgcttgactgcttatttctacgtttttgccatggtcgaggacccgggctatgttccgaaagtgagcagcaggaatcagcagagagaggttgttaaggaactgttcgaccagtggaagttcgacgaagagaatttttgcattccctgtatgacaagaaagccactccggagcaggcactgtcggcgttgtgggcgctgcgttgcgaaacacgatcagtatgtgtctcgataagtttctattgatctgactactaatgcttgaatagccattgcccgtggattgacaactgtgttggatcgaacaatctccgccattttgttctttatatagtctccctcgaagttggtatcattctgtttgtgcagctgactattgcctgtgagtactagtggcgaaagaaaatattggctaggatcagtcatctaacatgatgcagatatcaattccctacctgctcccgtcaatgccacttgcaatgtcatcaacgacacattgtgtgattacgccactcgcgaccccttcaccctgattcttaatgtatggatcaccctccagctggtctgggttacgatgctttgtgccgtccagctcgtccagatctctcgcaaccagacaacctacgaaaacatgcgaggccaccacatcgaccggtcctacccaagcacccaagcctttgcgtcggccatgaccgctggaaccacatcaatggaggccgctggtctttcggcttctggacaaggaccaaacccggctctccgcggttctcccgcacaccgacggaaaaacggctgcatccagcaatggtcatcccttctcggagtcgacgctttttggacaactgcgaaggatggtctccgcgatggaccccaggcaactagaccccgcaaccccttctcccgcggtgtcgtcaccaattgtcgtgacttttggtgtgacccggctccgctcttcggcaagcgccagactggggtggcgatgctcggcggcgaggtgatcaactatcatgatatgtacgaaaccccgatgcgcatgcgcaccggcaaccggtccggcgaggggcctggctaccgcagcgttgctggcgaggaccccgaacgcatggtataagccgatccgagatcttagcgtatttgcatttgttttcgattccagatcctgcattgatatccctctactttgtgttttattatgcaaatcagcgcggtgttgcgttattgggccacgtggcacgagcaaatgtttgcattttgcatttagaaaagatcttgtacaattgacgtcagatattaatgatttgtttcactatactattatgggggatgacttggctcttgagcagcaagacttgactttgactatggggtatacatatatgacacccacttagcatccaaggtcctcaacctccaacccccgcagtttcacatttcgcatcagataagatagatcgtctcggccgtgcagtgaccctgcaggctgcagctaatcaccaacacactgcataagggccgaattccggaccttccctgtgcggttctggaaagatacctagctaggaagggtagtcatattcccgtccgaagggaccgattggttcgtccaactgagtctaggtctaggtctaggtccaggtccaggtctgtacatatgtatatgtattgaaaggattatgctttacattacgcattacgcattacgtgagtataaaagtacctgcatggaagctctagaggtgcatatgccagcgcacactaatcaccaagcaaggaaccttggcagggctgcagcctttcagggacaagcaatgtttgacggccgagggtccagtgtggcctgatcttctcggtgatgcacttgctaataatgtagcggtcaacaaccgcaattggtttcttggcttattacacaaggtactcttactgtgctagggctgtcacctccccaaacttccctagacgcttccggaacaggcaatatatacaatgttattatacggtatagggtccattcaacggctttcaagtatggagcccgaaacaagtccgaatcatagtacgatctgaaacctacctcggtatggagatatggagacgaacgacaggagcagggagagacgtcaaatagtagctgtttcctgtacacatccgatatcgccgaagaaacagccgaaagatctaatctctcgggtaccggcccagtcctatggagacacgagccatgtgcatgggtctttggtagaatacagtcactatgaaaattagacaaatcaggtacatgtatgtcggctagtttcttcaggggacaaggtacgatccacctgtaactatcttttttttttatatattgcacgtcgtacgatgcacatggagagggcttccgaatcaagggaatagacagaataagacagaattataaaattaaaaaataccataacaagtgcgtatgcaggctccatttcgctaagactcgactaggcaggtgatggagcttgaggaagccacttttacttactccatagtgcggaattgcgagctctcatgaattctacatatgttgcccacatgaagagaaggtacggtcaagcctaatctaattaaaaaggagaaaaatgagaagaagaaacctagccatataaaagatcatataaatccaaaaaagaaaagaataagaaaaaagaatacccgccaagtcctcgatcagataaaaattttcaagttatctgatccatgcaggacccacttggatttatctgattcgacgtgatttattcagcttcggagactggggattcgtgttgacccaggaaataaaacaaaacgccagctaaatcgacatgaacctacacaacatcgtgcacaagctatgcatcctattagcaccatctaggattgggatcggcacgagtttcgcgcgacttcctgcatttcgtccaattgtcccgcattcgccaaggaaccattttcttctcaaaagttgtttgtgaccgtaacacttccgatcgggcaactccactttataggtccgcacacatgtttcggtactggttactttacagggatgattctaattgcctgaagatctgggccgatcggttcgtactgtgggtagactcggaaatgtgaagaaaattagaaaacaagctcatcattaacgcaaagaatagaaataagaaaaaaagaatctaaatacacaggatgtctaaatgttttcacccagaatagcgaagggaacttagaacagcgaagggagggggaatcatcgagctgtctcgccggacaaattttaaaatctcggcccacttcccaaaagcaaacccgagacacgtaacgacgatcatgtcacattttgtttcacggctctacagcatagcacgtacccgggtgtcctgcaccacgggagcaccagccaactgatccgcaaagacggagccaacaatctcgccactccgcacagccagcaccgacagcaaagaatcactcagaccgtgggtctgctcgttgcagccctgcagccagataccagcctgggcactgaccttggcactgtcgagtgaaacacggtaatcgcggccggggttccaggccgacgcgccggcgggccgcaagctgcgcacgttctcgaggagttcctcgtgcgcgtcgcggatgtagcccgtcgcaaccatcagcgcatcgacatccaacacctccttgccctcattctcgttcttgaccgacttgacgtggatgcgcatgcggttcgatgcgttgtggtgctcgatccgggcgaccttggtctccgcgaggatacgctgctgccactgtgtctcgtctggattctccacccgttgcaggtacatgtcgttgtagatggactcgatcagctccaagcgaaccacgctgtagttggtggctttttcgatcgcgatgcgcttcttgcgctcttcggcgctcatctcgtagaacttgtctacacgctcggggttgaagatctcgttcacgctggaaaaaagcaaaaaaagcaaaggttagctgggttgtggtactttggggctgtgtatttgggaggaaaacatacaaaggagagtcatcactgggacgcagagcgctatcacgcaggatgagggtggtgcgcgagttgggatagcggcggtgcaaatcgtggtagatctcagcggcactttgaccactgccgacgacggcaatgttgtaaggggccatatcgtcagtcagcatctggggcaggtgagtgcagtacttggaggagtgcatgatgcggggatcctgggggaaaccaggaggcatcttagccttgccaccaagggcaatgacgaccttgcgggagttgcgggaggagatctcgccagtaccggtgttgcgcgagacgacggtaaagaagtcaacaataccacgggcattggtgggaccggggacgacctcgacgacctcctcaccgtagttgacgacgttgtcaaagtgcagggcacaccagcgcatgtagtcctcaaactctacacgggccggcaggaacgtgcctagattggtgaagtggatgagacgcttcttgtggtggaggtagttgaggaaagtgaaggagctgcggggatcgcgcatagtagccagatccttcatgaaggagatctgcatacgcgagcccggaaccagcatacccgagtgccaggcaaactgattctgcttctccaggaagcagaccttgggcttgaagttggggtccttcaaggcaccgagggtagggtccatagcgtcgttcagggcaatggcgacagcgagcgacgccgggccgaatcccacacagagcagatcgtgcatctccccggcgccagttggtcgcaacagcgaccgagctgcctggggctgggtacgtggcaccatatcgaggaaggagagctccttgcgggtgacaggctccatgacgattcaagggtttttagagtaaaaggtaaagataaaaaaaggttaataagtatgtgtatgtatagaccaccggaaagggaaatcccagagcttcaaggatgagcttccaaggtttttgtttttggttcagagcaaagaaaaagaaacgggaaggaaaaaggctttatatggttcggagacgaatgtagcggatcagataacttgaccaagtggatccgcctgaaggttctctgaagccgctgaagcctctgaagcccttcgcctcggggtttttattatttttctctgccaagttttcgtatttccctggttcggggtgtttttttcaattttatcaattttatcaatcagtaaatttcccgttggtctccaccgaggcagagacggcgatgttttatttccattcgggtgtatttttcttgtatgtcttataacccggggctcagatgtatattatacttctagtaccttggattagagactccactccatatgcaggaagatagaagaagaagaagaaaaggttcgatgcttcatgcacgcctaactcggtcaaccagagcgcagccatttataattcctcgaaaaacccaaaaaaggtcttacggccgatgtcgggaataattggacatcggaggcatgtccggaaagcgttattgtacgtattcgcatgtgtatataacatgtgtatgcacgttgttcttcctcttggcaacgcttgggactcgtttgcagtgggggcacatcctggaaaactcctccgggctatagccagtggttagggctttttgctttttattattatttgtttgacgcttgggcagtgggaagtggaggtgacaatgatattatatgaggctattattgctactgccattgtatcatccgtattgatatgtttctatttactgtacctaatacgtcattcataaccggacactttcacagatccacagctgtttcagcggttgaatcagccgagtggtgggggaacgtggtctgatgattatgcgtacatttgaaatttcgaagagagaaggtgctggatgagagagtaatagagtcatacagaagagaagaatagaactaggagacttagtagaatcataggctaatattcttttccgcgcttggctcggtgatcataaccccccccccccccatctcatgtattctcccgtatggatgtgcccctcgatttgctctttttaaaaaaaataaaaacggacgagccccttgcgaaaaattcctgtatgtgggacacttttttttggcgcgcttgcctgcataagatcttctccagccactcacgttgcacctaattagatcgactaagcaactctactacctacttaggtatataccttaccttgaatatatgtatgaatgagaggagagggagagcgagagaaaaaaccaccacccaggccatggaccgattcactcaattccctgccgtcaatgacgatggtgatgatgttcatattgtaccctggcaggtggatgcccaactcccctcggagatacttgctttgtcatgggcagtcttgctacgtgcattcacaacggatgagaatcccgtctttctattgaatggtgcgccagtcaaggcagatctgtctgcccaaacggttcagccagcacatctggctgccgtatcagatctctcagtcaaacacactgccatagtgctgggagatcctccgtccgatgatgatggacatctcccggtgttgcagtggaccctggaccccacgactcagctgggaactttgcgtgcggctggaggcatggatgctactttcctgtaccagttgggcaaccagctgaaggtgatcgtgcaagagcaggctgttctaaagggtataccggtgacagtgtctgccaccgaggttcctgatctagccatttcaaatgcctccccctccacattaccagggccccggcttctacacgagcttgccctgcgtgagctcaacaattcaaaccatgccattgaattcctcaaggcggatggaaacgttcagtgcctgtcgtaccatgacttggaccggctttcctcggagctggcgagtaaaatagctcgtgcttcgacgacctctccgggcctacagaaggttgtgccagtacttttgccccagtctgtggaattgtacatttcatggctggctatcctcaaggctggcgcagctttctgccccttgaacaccgatgcaccaacagatcgcatcgagtttatcctgcaagatgtggccgcatcggtggtggtcacaaatgatgctcttgtaacaaggataccgctgaaagagcatatttctattctcacagtggacgatcttcaaaccaacgccgatatcacagagccatgcgcagaaaacagcacttccactgatctggcgtatgtcatgtacacatctggctctacgggccgccctaaaggcgtcggggtgtcccatcttgctgccacccaatcactccttgctcatgatgatttgataccccctttcaagcgctttttacaatttgcatctcccacctttgatgtttctgtgtttgaggtctttttcccgatgatgcgagggtcaaccctcatcgggtctgagagagagaatatgcttcttgatatttcccatgtgatgacgacgatgagagtcgatgccgctgagttgaccccaacggtggcaggagagttgctgcgcacgcgagccgccgctccgtctctccgagtgctcctcacaattggcgagatgcttaccagacacgtggtagacgagtttggccagtccgagggcaggggtggcattctccatggaatgtacgggcccaccgaagcagcaatccattgtaccgcggccacccatttccaggccaaggatcctgtcaatatgattggaaagcccttcaaaaccgtgtcggcatacatcatgccactcccttccgacgagccatcctccaaggagcttcgtcccctttcactaggccaaattggagagcttgtggtgggtggtcctcaattggcagacgggtatatcaaccgacccgaagaaaatgccaaggcttttatagacagtccggtgtatggccgactctatcgcacgggagacaaagcccgcatactccccactggagagattgagtgttttggccgaatttccagcggccaggtgaagctgcgaggccagcggatagagctaggcgagattgagcatgttatcaccagagcctccggtatccgcagtgctgtaaccatggttatcgacgggaacttagttgcatttgttttggttaccgacaagggaacgacggacaacagtctccgagatgtctgtcgtcggctgttgcctcgctttatgatccccggagaattcctgctcgtcgaccaattcccccaacttccctcgggcaagatcgatcgtaaaacactagaagccaatttcattcgccaccgaagcactgccctggcttttgatgatcaaccctgccgagacgaaaaagaagagtctatcgcctcaagcgtagccgatgtgctaggccgacgactcccgtcgacagagagcctggcagcagcaggtcttgattcgctagcagcaatccgtctcgcgtctcatctcttggatgcaggaattcggctaggtgtggcttccttgttggaggccgactcagtggacggaatctggcaacttgccaccagtcttgaagctatgagcccaaataatgatacgcaagcagccttgcaaaccattcttcagcttgttttagacgcaggtgcagcaagggtcgactcgctgggcttgagcgatcaggtttcggacgtcataccgtgtagccatatccaacaggctatgatcttggagactgttcgagataacaaggcatactgcaactggattgagctggaattcgagccctcggtcagttcaactgcggtaaagaatgcatttggtcaactggtggaccacaaccagatcttacggtccggatttgtggaaatcggcctcaaagatcactcatatggtcgattcacctggaatactgtcaatgaccatatttccctgaaacatgaacttgaatacgatttgggcctgagtgcgggtcacgatgtcttgaacccttttcgagtccagatcaaagaaggcaaggaccatctccgcgtgctggtgcatatccatcatgctctttatgatggatggtcttggcaaattatgttgaaagatctcagaagtatcttgtccggagaggagctcacttccaaaccgccatataacatcgtcgcaaactatttcattgagcacaaactggacaaatcggcaatagagtcctcagtgtactggcgtgaacaactccaaggtctttatcctgcaactttccctattttccacggacatacagatataatacatgctaccgacaaggctactcgcgtgctggacatatccgtatcaaaactcaaccaagtttcccagcatcttcgcgtgagccggcaaaccatttttcaagccgcgttttgctatattctctcttcctacattggaaccggtgatatcacatttggaactgtcttttcaggccgaactctgcccttgaagggcattgaaacggttctcgggccttgtatcagaactttgcctacgcgcatgaacctcgacaaaatgcaggacgtgaccgatcttcttttggccatccagaatatgaaccgcaagtcactcgagcatggcagtctttctcttcaggatatcaagaaggcttctggtatcggcttggatcgcagtctcttcgacacagcgctcgtgtggcaggaaagcatttggtcagatgatgaccagggctcggtgttccgggaagttggagcgggggagtttttagaatttgcgctgttgctggagtttgagccgcgagaagaaaacatctttgctcgggcgacatatcaagagtcggtgctaccagttgagcaagctatgatactactcgagcagattgattctgtggcctcggtcttgattgacaagattaagcttccaatccaggagattcgatcgtatcttccctcgtcaacgctgtcaattgaacatgcaacattacgcgatcaagtcaatttgccaagcctggcatctagcgtcgagatgattgcttctacagacccggaccgggtagcggttgagttgatgctctggaagtcagagaattctacttcgttgatggaaagcatgacctatagtcaactaaactcccgagccaatggctttgcacacttcttgctccatatcggagtgacaaatgacgatctaatagccattcatctgacaacgtctcttgacttttatgttgctgtgcttggagtcgccaaggccggtgctggtctcctcctccttccccaggcttcttcgcagaaaatccattctattctctccacggcgaaatccaagttctgtatcatcgaccacttgacggaaagagatcatagcttggattctctgaagtccgtccagctgattcatctcttttattcactggatgtttaccatgagtttaatattccatataccagtaaagggtctgacgttgcctatgctgaagtgtcgctaattgaagatgacttgattgaaaacatcctcatctcacggcaaaacctgcagagcaatatcaatgctctgtcagactcgtatccagcgccaaccggatcgaaaatgctatcatgtcttcagggatcaggtggtaagttttccatgacattttaattttcagattatctttctgacaagaatacagcatctatttgccaggcattctttgcttggcatgctggcatgacattgtgctcagctacagaattgataatgatgactcgtatcgagcaagcctgtcaagacatgaacataacacacctgcacttgcctcccatgctggcctcccgtattgatccacaagccgtccccagtgtgcaatatctcctctcttctggtgaagaaatgacccttaagctccatcacaattgggccggcaaaggtctgaatcaagcatacagcaaccatgcactgactcacgcatgtactctctgtcttaatatgcaggcatcgacccatgttcgaaacattggtagacccctgaagaacacatctgccatgattgtagcagatggagattcgctcagccttcttccacgcggtgccattggagagctatgcttcggcggggatcaaattgggcgctgtctacctgactccaagtcgccagttactgggcgattcgttgatcatcctgagtttggtctgatctatagaacgggtgactctggaaggctgcttcctgatggtacactcattctttcccgaagctctggccttgctcagtcgtatgctccgtctattgatctagacggagttgatcgtgctctgatgtctttagaaatggcaaaagaaacagtgagcatgattttggatgagccgacactgcgattggcagtgttctgggttccttcaaagaaatgctcaggttccgtgcaaatcgagaaggctacgaatgatcttttcaaggagctcaccaagaaactttcttcttctgaccttccatcccttcttgttctcgttgacacgatagatctcactaggtcttataagattgattacttcaagctgaggcaacggttggggcaactgataacgaaggagcttgcgatattttcaccaaagcctaataccgatactagtgacagtttcactgatcttgagaagactatctctgccgcgctatcggcagtcactggcaccgaccaaacaaacgtccgcaaacacacatctttctacagactgggtctggactctctttctgccatttccttctcgcgaaagctgcaggagtctggatgtggaaggcttgccgtgtccacaatcctgcgccatagctctatttctcaacttgcagctgtcattactgccacgaccaacggggatcagcccgaaaatgcggtgcccgcaccaccaacagtgttcgatgaaatcttcactcatcaaatagaagatgagttcaaagctacagccataaatgttcaaagcatttacccttgcactccactccaggaggctatgcttgcagctgaatctggtgatcattcggcttatttcaatcacctcttgcttcttgtgcataccaatgccgagaccatgagagcagcatgggctaagatgatgcaaagacaaggcattcttagaacttgtttcacgcaaactaatgataggcggttcgcatatgctcaggttgtactggacacatcggtcttaccgtggtcccatattgaaacttcctcttctgagcttgagaatgtcatcaaggaaaacaagtccaagttcgagggtatttctcctgtcaacggccagttgccttactcattgactttgataaccgattcaactgcgcagcagacatatcttctactgtccatccatcatgcactgtatgacggagaaggtatcgcccagttattgcaagagctccagctgttgatttcaagtcaaaagttgccaaagaacactccattccgcaacttcatcgattacatgacctctgttgattatggctcgtcggatgaatactgggaccagtacctgtccggtgtttcaccgaccctccttcccacacccgggcccgcagccaatgcaaatgagtcggcatcacagcagatccatacatccctcaatggctctttcgtatcattcaggcaaaactgcaaagacctctccgtgacccctttgaacatcttccatgctgcatgggccagactcctctctctatacaccggttcatccgacgtctgctttggcaatgtcttcagctgccgaaccgttcccttggatggcgcagatcggatagtcgggccttgtttcaacacactcccaattcgaatcaagtcttcttcaactgcaacaaatagtgacatcatgaaattgtcccaaaagagcaataacgacattttgcctcaccaactcagccctctccggcgtattcaacgacgtattcttggcgatggctctcgccttttcgagacgctcgtcattttccagaacagaaatacagatctcgattccaatatctgggaacttcttcaggacgaaggaaacatgggattccccttgatatgtgagatcatccgcgacgagtctaaagacaaaatacagatctgcctccacttccaagtatcgtatatctcacaagccgtggctgagaaaattgcgcgggactttatagtccttgttggacacatcattcaatatccgtctgctcaggcatccgataagcggctattaggggcagacattcctcgagtatttgaacataacgtgtctaagacgtcaaaatctgttcagttccccacaaaatctcgccaaaagctcccatggtcctatcgagaggagattgttcgcgaccttctttgcaaattttcggatgtcgactcggataatgtgttccaggacacaacgatcttccaacttggcctggatagtatcaacgctgttcaggtatcggcgaagttgcgtgagttagggtataagatctcatctggtgatattctcgaggtatgtcatattcctgggggtgaattctattctctacctactgacttgtatcaggctgcttctattgatcaaatcgcttcccttcttacttccaacgcgaagattgttgaggaaatcgagttcgactttggacttttccaaaccaattatttgcagtctgtttgccagcaacttgagatttcttcgcaaatagtgcagtctctgcgcccttgtacgccagtccaaaacggaatgctggcaatttttacacattcacacggtgaagtgtacttcaatagaatgaccttaaggtcctcagtacctttagataagaaggtcttgaaagaagcatggtctaaggtcatggctcagcatgagatgcttcgaacaggatttgttgaattgcgcgatcagaataatccttttgctatgataacttaccatgaatacggcaaattaccatggtacgagacctcgtcttccatggaagtcacttctggtgttcaacaaaggcacgctttggaaaatctccaccagcctccatggagcattgaagtcgaagtaggtgaccacaccagtatcatgcatttctctgcattgcatgctatttatgatgctcagtctctggccaccatattttcagacgtcagagcagcatatgaaggaaaggctctggctatgccggccccagtcaccaaaactctcggccctatccttcttgagagtaagagccagagcgaatcagcgcaatccttctggaagggacttgccccagaagtgcagccctccaaattccccgacttaaatcccatccgcacaaacgagcgaacattactcaccacctccatccgttgcatacagtctcgcaaggcttttgaagatgcctgtcgagatatcggcgtgacactacaagcagcggggcaagccacgtgggctcgcttgctctctgcgtacacgggcgagtccaacgtcacttttggaaccgtgctttcaggtagaaacttgtccgctgatgctcagcatgcggtattcccgtgtttggtcacagtgccgacgcccctgcatattgagggttccaaccgacagcttttggactgtacgttgaagcgaaatgctttattggtaaagaatcagttcgcgcctctgtcgcatatccagcgttggctaggtagcgatgagccactcttcgacacgctgtttgtctatcagaagtttaattctgatgccgttggtgctgataagtgggacatcattggcgaggagacgaatattgatgtgagtaacaagcagacaggatactccacaaatttacaggatctaggctaacattatatagtatcctgtctctatcgaattgattccgcactggaacgatcttcagatttcgttgagctaccggggcgatcttgtacccatggaacaagcaaagatcctcttgaatcagtatgaaagattattgcaagatactgtcttctgtccagatgtcaattccaccgattacgactctgtgggtagtagtctgctatcaattactcctgccaaagaagcaccaattcctaccacggtttctttgctacatcaattcgtcgagacgaacgcgatcaatattcccgagaagattgcgtttgaatttgctttcggtgacattgcagaaaatctgcagaagaagacatggacttaccgtgagttcaatgaatgtggcaatcaaattgcgcatttcctgcaggccaagggggctattcctggtggaattgtgggaatatgcttcgacaagtgccctgaagcctccatggcgattctgggtattatgaaagctggatgtgcatatctggctattgaccctggtgctcctatctctcgtaagcagttcatgttagaggactcggctaccaagatcctcctttgcaatcaatcgaagatggcggaactagatggtcttccagctattgatgtccaggcacttgatgagcctgggcttcttgaccgggtttcaacaggggatatctcactttcccgtcctatccagccagatgatacttgttattgtctgtacacatccggtacaactggaacaccgaagggctgcgagatcacgcacgataatgccgtgcaagcaatgctggcattccaacgattgttcgcaggacactgggatgaagagtctcggtggttgcaatttgcctccttccattttgacgtcagtgttttggaacagtactggagctggagtgttggaatttgcgtcacttcctgtccacgcgatttgctgtttgaggacctgactggaacgatacaaaagcttcgaattacgcatattgacctgacgcccagtttggcaagactagtccatcccgatgaagttccgtcgctttgtcggggagtcttcatcaccggcggagaggccctgaaacaagaaatcctagatgtctggggcaagcatggtgtcatctacaatggatacggtcctactgaagttactatcggatgcaccatgctcccacggatgtctgccaatgacaaagcctcaaacatcgggcctcaattcgataatgtggggtcatatgtcttcagccccggtacgacgacaccagtcctacgcggcagcataggcgaactctgcgtctcgggacctctcgttggaaagggctatctgaatcgagtggagctcaccaaggaaagattccaagagcttcccgaatctggcgatcgcatctatcgcactggcgatcttgtgagaattttgcacgatggaagcttccagttcctcggtcgcattgatgaccaggtcaagctccgcggacagcgacttgagattggagaaatcaacgaggtcatcaaacaagctacgcctgaattgaacgaagtcgctaccctggtcatcacgcaccccaaacaatcgaaggatcaacttgtctcctttttcacgactgtcactgcagataagaaatctcgtgctgtcgacgttggagtccgatattcagaagaggaccgcgccctgctatcgaagatcaagggtgcttgccgcactcatcttcctgggtacatggtgcctacacatatcatcccgatgacccaatttccgctgtctgccaataacaaggctgatatgaaagtcttgaagagtatctatcaggagctttcgctagaaaacattcagaaattgagctcgatgagcgttagccagtctactgacagtgtccaggaacagaagatcatatctgtcctggcgaggtttattggttcctctgaggagaagatctcatcatggtccagtatctacgagcttggtctggattctatatctgttattgctttctcgagaagtctccgggaggctgggttttctcaggctcagccatcgaccatcatgaagtgtaagtctggcagtctaggtgttggttaagaattacttgactaacgatacatagaccctacaatttccggcatgacgtcggctctacaggtgcctatctcatcttctgtgtccgtggaaaccctccaacgcaatgccaagcaaggcatcgaggctttcgctcacaaaaactcccacgctatcatcgagcatattggagcccgctacggtgacattgaaaagattgcgccctgcaccccgcttcaggagggtatcatataccactacctggctagtagcacgccgttgtactgctcatctttcactttcgagctcgacccttcagtgaacctcgagaatttgcgcgcggcttgggatcaggcccagagagacgttcagatgttgcgcgccagatttctgccatctccagacggctatgcccaagttgtcatgaagaaagacgcccttccttggttccttgctacggccggtaccaatcaagagattgatgacttgcgcaaagaacgacatgaccactggattgcccagctcgacggtctttcatccaatctatgggaagtcggagtcatctcttcccccaagatatcggtaatgtgtttgaacatcttccatgctctctatgatggaaatagcctagtcctgctcctcgaattggttgcccgaagttatctcggtcagatcgagagttcggagttaatcccggaattccttgatgtgttgcacttgggtcccctttgtaaaaaccctgctgcagaggcgttctggaaagttcatcttgctggctgtcgtgatcgagctttcgccgaggacggccaagtagacagcgcgccaattctgcttaaagctcaaatgaatgcgacagatcaagttgaccatcttcgccggtctctcaatgttacagagcaagctgtccttcatgcctgttggcttcttactctccagcaacaatactccttcgtgccaccacttggtatcattgcctcaggcaggacaatcgatgtaccaggcattggcgacgttattggaccgctgttcaatacgatccccagcaatgtccagctgcatggcttggagtcttggtctgatgtcgctcggcgctgccatgactaccaggtgtccatgattcctttccaatacaccgccttgcgggacatcgtgaaatggctcggaaagaaccccgacgagcggctcttcagctccttgtttgtcttccagagggaagatgataacgacgaatcgttcacaaaagatctttggtgtacacttgactcggaggcccagcatgaataccctctggcctttgagattgtacgcaatagcaagcaattttttacagccactattgccgcaaagagtcatgcggtatcgtcggaagatgctcagcagatgttatctaagtttgagcaaattctttttgagtttgcgcaagaccccaaaagagagttgcccaagataaatggggtgtctctcgcacaagttgtggcggatggtgaagtgaagggacaccacgagtctccaagaaccccagaacataccaatggtgaacataccaatttcgaacatattaatggctctttgtttgaatggacttcccaggcttgcataattcgcgacgtgattgaaacccttgcgggggtggagccgcaatccatcaacgagaacacatcaatctttgaagttggacttgatagcatcgatgccatcaaaatctcctcgcggttgagcaaagccggcatcaaacttcctgtgagttccatcatgcgccatcgtacagtcaaggcaatgagcgagcaactctcaatgacaaatggtcataccaaggatgggacattatcatcacttaatcggctagagaaattgttgaccgagttcctcggggctgaaggtcttctccccccgagcgcgattcgagtcttaccagccacacccatccaagaagctatggtcgctgaaatgtgtgcctctgggtacaagcattattacaaccacgagatcctcgagctcgagccagatgtagacattgaaaagatggagcgggcatggagagctgtcgttagagctcaccctatcctccgtacttcatttgttgaagtctgggatccgaagattcctgtttcatacgcccaaatagttcacaacgaggatcaaattgacctcaagactatccatctacacggcgtctccgtggaatccgttataaagactcagcgctcaagggtccacaataagccggcaggctgtcccttgctctctatcaccattgcagtggaaggggataggcggtaccttgttttgtcaatttcgcatgctctctatgatggttggtcaatcaatctgctccacgaagacgttgccaaatcgtatgctggtgtagagtgttctcgcccgccagccgatgaaattctcgggcaaatcattgcctcgtctggcgacgaagccctcagattctggcgagcaacgctatccaaattcaccccggtgtcattctctcctatggaacatgcggagaatagctcggttgtcgttcaccgagcagaacaatcattatccgttccaatgtccaaggcggagatgttctgcaaacgtcatggcattaccctccaggcgcttcttgtcggctgctggtctcttgtccttgctaggcatgtcaagaagctagatgtggtatttgggcttgtcctttccggtcggaatgtggctaactctgagcacgtgatgttcccgactatgaacactgtcgccatgcgagttattcttcatgggacgcgggtagaattggtgaaatatgtgcaggaggctctcctcgccatgtcggagcatcagcatttcccgcttcggcgcgccagaccagatacgggatcgcgggcattgttcgatacgcttttcatgtatcagaagagaccggtcgaaattgtccagaatgagcctaggcaagtcttatataaatctactggcggagcagccgaagttgaataccctgtttgcgctgaagttgaaggtgtcggggaggatctagttggacgagttgcttgtcgtggaaatgttactgggtatcaagatactcttgtgctgttggagcagatgagcgatatcctttcgtctatcatcgatggtccatctgaacagactgtggattttaccagtgagggagtgaagatttgtggaagcgccgctttccaggatgagtctgaacaaaatatcgagcctgaagcagtgcccgggacactcgatcaggcggaatggtcgccgattgagtcaaagatccgcaaaattctttctattgcatccggggtacctgatgattccattgacaagagctccaccatcttcgagcttggcctggacagtatcagcgccatcaaggtggctgcactcctgaagaaacagtccgtcaagcttgcggtcagtgacatgcttcgggctggtactgttgaaaacatggccaaagcagccaacagcggcctaacggaggtctcgctcacaaatatatcaagcattctccacgattcactcgatggcatcgatgtggcgggactgctacagtcacatggtattgatttgcaactagtacgaaaggtgttccccacaactgcagggcaaacctatttcctctcaatgcacattctgaatccagagatattctatcctgagttttactatctgacatcacgacaattgagccctgaagtactcgatcgggcctgggctcgggtcatagaccaaaccccaatgcttcggacggtattcgttcccacttccgactctccgctattaccctatatgcagatcgagtttgaggttgtgcacattccggtgatctggcattccaagtttgatcggcatcttgtttcaagaagccctaagcaagaatttggggtagtgccggtcgcactgcatgcctgtcaaacgaaccagggaacggcgcttattctgcaaatccaccatgcattgtacgacgctgtcagtttaccccatatactgaacagacttgttacgcactgcggccaagaggatgttgtcaaaccaaaccccgaccttgatctcgcacagctcgtggcattccaatatgttcattcgcccgtggatgtccggcggcaattctggcaaaagtatctaggccaaatctcaacggcggtaaaacgagggcattgcttcggctctgtgcaacatcactaccgaccgggcctggtttcaaatatggccagtgtcgaaaaggttgccaagcgccggggccttagcattcagaccgtctttttagccgtctatgcacgagtgcatttgcagcaattcggtgcagctgaaaccacaaatggcgcagggtctcgcaggcggtcaactgttggactgtaccttgccaatcgatctcattccattgagggtttagccgaatctgttattcccaccgttaacattgttccactacgactggatgacaaactcagcgattccaacgacaccctccttgacgccgcccgcagaattcagactgaaatcaacgagatcagccgacccgaatattcgggcgtttctctcctggaaattgccgaatggacgggcatccgaatcgacacctgcgtcaatttcctgcgactccctgagcaagaattgaaagtacccggcaactgtgaccacgcaaagttttcttttacagcaattcaacgcgaggagtttgaagatcttagcggggcagccccggtttcgaaaaatgacccaattccgattaatggcaatggtgtagcgccacctggtgcagccgagacgatcccaggcctcgagcatccaagcgcctcaacggcggctactcaagacatcttccaggtaagtgggggaatgcacatcactttatcctaacgggtaattgagccttatacaattgcttacatttcaacagtctacgatcgacgtggaagccgccatccgtaatggtcggttagactttgggcttttcgcaccagaatctcgtcttgaccgagatacagcggaaactgtgatcggcgctatgcaacgggagatgtcggcattggtgacaggcttcgaatcgatatagaatatctagtgatgctagggatggaagagaggaggggtggaagagtatcccggagcgattccacggcgtatgaagtagagtagaccaagatcgttttttttttcttttttcatgtggatactcttctttttcgttacctttttttttgtgctatttgctcttgctgtctggctcatcatactcgttgcatatgaggcgttgaatgtgtatatgttgcttttcccaatcgaattatcgaactttgatttgacgagtgacggcgggacccacggacgggacgggcccggggatctttttatcttttcgaactgcaggagataacatagatgtttgggtgtagtacatagttagtatagtctcgtatagggtgttataggtacaacatggaccgggttttctttttttggtatacatatatatccctctcgttgacattggaccaagtactagcctttttttcacattcccccaagaataggactgatgaatcagatatggaatataagaggcagtgcgatgcataggtttaagcaagggggatttcgcgtggcctatcgccgacttgaagttgttcttctctttctttttctttttctttaggttagagcaccgactgaaaataacaatatgtatactagcactccgtactccgtaccctgattgaaaataagaaaaagaagagaagcggcatatacccctccctttgtttattgtggcgtcagtgcaggggccgtgcgaatgaaaatcgaagacgcgcagtgttccccaaggacggagtacagcgtacatatgggcttaaatttggatttgggttatcttagagctgagtttgctggcattttcattgggatattattatttttcatgggttataagaagttcttgtctcgatgccatggttttatatagggctatttattgtttattgcttacctaatatttgttgtcacaatcacgcgtcaccctaatccaaatcgggcatccaacgatcaacaacgcgactgcgcgttaatcggtttggtctttatttctataacacacccgaacaccctgaacactttagaatacaaacgtctggatagttgattttcgcaacattctttggtatccccaagtggtttgttaaagcccaactctcgattcccgatcgttggacacaatcacataccaatacccaacccctcctcgattcactttcgcgccctcgtgggctgacctcaccttttgaattgggggaattaccccttgcgaccttcttttttgttggaagaaaaggttccgacacacccttgacactacttttacaagagtgtacttgcaagtgaaacattccacacgccttgatctggttatcctcgggtatcaaaaggcatcaaggtgaaacatcgcaggcacgcaggcacgcagacacacgcgttcgtgcttgtccctaggagagaagtcgaattcctttcaaggttggaatccgatatggaagtggtgtgactcagtcttgaattcgccactcgcatttgatcagtttggaaaacattccattccgcgtgccttccttcggatatcatattcttcgaatatcgaaggtatccttggctcctcgtcttcctatctttcccttttctggacgcgttgttgatttgaacgcgtcaaacccttgggaccttgggaagcttctctaaatctctccatcttgagttttcaaatctcgaatctctgggtatctacatttccttttaagatatccagagcgcatttagtttgcgacgcgctcttcattctggactcattgtgcggcacgtggacacattcccccgatcatggttgcaaccttttcgccgcaccgggactccggtggcacacttcatctgccatcgcactcgggaatccatcacgttgacgcgagctctgctatccgccaactgaggcgctctctttcgcgctcaccatccaagagttcgaacttcttcctcaacccgcgtgctcattccccctccaaatccacctacatctcttctcccttgtcaccctcacggcgcgcttcgcataacaatttcgtcctcttcccatctcatcaatctcaccagtcgcctctcgccgtcccttaccctcctagcgcgaagattactaggccagcaatgcgtcgacgcacatcaccccgcagtccacccaagcgcgttttgagtgtttcaagtgacagtggtaacgcgactccaactcaactcgtcgctttaccctctggcgaagaaaatgatttgactctcgatgacctcgtcgcgccaggtcaaagtacgaccccagacagcccttgttttattaacactactcctgcccctcagggtgaatcgacttttgcaccgcgctcaagcttgtcgcgcgttgaaaagcgacgtagtgggaactttggcagctttgcgacgggcagtcccttgaagcgcagtgacgggatcatgaatttggaccaagcgtcgcgaggcagcccttctgcaaaacgacgcagcgtgcacacttccaatttctccgccgaatttagcattttcgacaacgaagtcgagaacaccaccccagagggatctccgacgcgcaacgaaattccctctttccccacgcctgtccagccccacagtccattcgcgaccattcctaagcgctcatcttctctacgacggtcgactctgcagcagcgcggcgatcgacctctctttggacggccaagggctttggatgattcgaccgacgcatcaccacctgagacgccattgtcggttaggacgcgaacgtcatttgatagcagcctattccagccaggcagcgagaacattttctcgcctaagccgccagccagccctcttttctccaactccttcgccaaccctcccgtcaaccccactgtcaacgctactcaaccccctcgacccactgctcacccactctctcgtaccatcactcagtcctcctctgggtcgagtatcgaggactcgcccacacatcaacctgtccacaagcccgaaggccggcgaacaatgttcaacttctccaaatctctccccgtgggggctactcgtccagcccccgtaactcggctcacaggagaagacacagaaacctttgcgaccccagataacttcaggctagtgaagcctctacccgcggcattcatgtccactggtcttatttccaagaaaaaccgcaatgcagaggaaaatctcgcattcaacaagagcatgcccgatacaccatgcaaacggcctgtcaaccttttcaccgctgggacaaaccccccggaccgattattcgacaagtcacgtctggttcatcaatcagacgccgtttccgtctctccatttaacccacctactacctcgcgtcccaagccaagtcccttcgctcggggcatgggaatattcggcagcagcttcaataggcctgagacctcgcggcgtgggagtttcgctagcattgatggcgatgaattgattcttgcccaatcgccctcttcccgacacgacagccagcctccaaatgatgacttccctcccacaccgaccaaacagcctttcctcccctctcgcacctaccctcccgccacttctcaaatccaatctctagagcgactatccgagacagcgagtccgctgcacgagaagcttatgcaggcatcacctcacactccccgcgaccagtacttccctcccgacccgagtgggttatcgatatccgtgcccagtgaccatcagtatgtgcaggagcatgatcttcctgccactccaaccggaccgcgagactcctggtcatcattcagaaggcccagtctccaaattagcggctaccatgttccagatgtcgaccccactttgacatcccgctttgacagcgtggagcttattggaactggcgagttctctcaggtattccgtgtcgcgcagcctcatgacgcgtccttcccatctgtcttctctcttccatcaagtgaaccaaggtcgccaacttctctcccccatcaggtgtgggctgtcaagaagagcaagcagccctatctagggctaaaggatcgcgagcgccgtattcgcgaagtcgaagttctcaaggccttgaccaactgtgaccatgttatttcctttatgggcagctgggagaacaatggccatctgtacattcaaacagagttctgcgaagagggtagcctggatggcttcttggcacaagccggtctcaaggcccgactcgatgactttcgtatctggaagattttgctcgagatgtctctgggactgaagcagatacatgacaagggattcatccatcttgacctcaaacctgctaacattctggtcacctttgagggtactttaaagattggtgactttggcatggcgacacgctggcctgcagaggatggtattgaaggcgaaggagaccgcgaatacattggaccggagattcttatgggccgatttgacaaacccgctgatattttctcacttggtctcatcatttttgagatcgccggcaatgtggaactccctgacaatggggtatcttggcagaagctccgcaacggcgatatgagcgatgtgcccagccttacctggagctcggagaccagcatcttccgcgatgcatctggaaatcctatctcggaagggtcatctttcgaggacctttgtacatccgatctgggtgacaacgaattcggcgatgatttcctgacaagtcgtcaattgagcaaccccaaaccacaacgactcgcacgaagcggggagttgattgatccacccagcttcatggttgatgccagccacccacaggcattggacggaattgttcgatggatgatatcccctgagcctcagaaccgtcccacggctgaccaaatcctggaaacttatggagtgcaatttattaatcaacgacgccgcgctggcgccaccgtcttcgagggtaactggggccccgctgacgagatcttggccgaagatgccgaaatgatcgacgtgtaatttaatatcccttttactcttgtgcatacggagggcgttcctgcttgtttctctgcccttcttttttttcttttgtcacctcttcccggtgttcgacctgggccattttccttttcctttttttttttgtcccatctttgatgccatgttttcacgtcacgacatcattcccccatccatcctatgcttcaatggttgaggctggggttttctattgcgggctggggcgttattgatccatcaggtttggatctgggcgttaccttgagcagttcacggataccacaactggagtttgcgaagggtttataaccctgtttcacggatcttttttttttcttttgtacgattcgatacctagcgttacgagatgccagaaatgtaccaacctcacaggatgcttgcttctggaaatggtcaaggtcactctggcattctgctgtattcgttccaacatatctcttatcgtcttgtccttgggagtcaatcgctccgaggcgacaattctttccagggctgatatctggtcggatggcatgcttagttggcttggaaacgtcactgctatctttgctcttttcttttgccttttctaatgatcaatgtgtgccctctgggcagtgatgaccccctatccattttctttgagcgtgatcttctctgctagtttggtgtctttggttgaacacctgggttccatgtctgtgtagtagtaactgcaatgacgaactgaaatgatatcctacgagcatcttgcttcaattgtatagtttattcccaatcaaagtataactaccgttagttatctatacctatggttagtcgtattacaagacaataacttcattgtctcgtagactggcgttcaagccttaatatccgatattcaggcaagccgacattaaaaccaatgaggatatgtgatgtgaataccttctggcaagaatgcctctcaatggatgtcgcttcagctcgatacaatcaatcagttgcctaaagaaattcggggaacaatacactatatccttttttaaggccattacacgctggttacttcatagctcgctgtattttatcctacccactatatttaattccataagattacgtgggagtacgggggtcttatattcaagacaaaactatgatttatcttcatcttttgtctgtacagcgcacgttgtatactcccaagcccaaaatatatttcggattgccacgggatttcttggcatttggcgcaaacttctccaacttcttgttccaaaccatctttaacctcgaaacttggcaccctgctctgcaagtctccctttccctggtattgagcttgacttattggatctctacactttgtgcaacatgcgccgctgtctccaagaccccgactcacaataaccgcaccttacctccacctcaagaagctccgccctgcacatcaacttctttttagttttctctctcccataataacagcccatatcacgcaccatggacaataaagatttcgtgtcggaaaatcttttccgcctaacgggcgcgtcagagcccaccgtaatcgactttgtactcgcgaccgccagctcagccaagtcgacctcctccctccaagataccctgacgtccttcctggatggcatagatgccagcgaaattggtgcctttgctcgagagctccatgcccgcatggggaagggcgcacagtccagcgcctctgcctccaaacccgcaacgagcaaggaatccacgaaaaagaagtaccgtctggtagacatgggcgaagaccaaccagaacccgccccatcgctaggaccgaccaacgtcgaggcagaccgagagcgacggaaaagacgggacagagacagcgacaaggataggagcagcagcaagcgagactccgagcctcggagtcgcggggagaaggacgacagccgaaagcgagaccgaagccgcgatgcagagagccgcgaccggccacggatgaggaagctccgcaagaagggctctcaggacttcgacgatcgatggggcgacgaagagatcctcgaacagattgtcgaaaacgagatttacccgaaggaattcgaagagtcccccccaaagcgcacacgactcgatgatggctctgcgtctcccaatcccgcgtcactggccgacgatatcgatatcgaccctgagaccaagcaagagatcgaccgccaacgagatctccgtgaacgagacgagtttgccaaacgactagctaataaggaaagtagcaagtcgaagaagattgttgaggatcggacgcgcgacggcgaggctgcacggcgacgtgcgctgggcgatgatgccagcgcacgggcttcgatgatgcccgatctgcgagaacgatctcgacaggaatacttgaagaagcgcgaggcagaacggttagcactactgcgacgacaggttatagaggaggccgcggagttgcgtgaaaaccccaatctgtctcgcaaggagaaggaggagttcgcgcgcaatcgagaggtccttcgtctcgccgaggaacggcttcggatcgacgatcaccgtgatggctatcagatgccatccgactatattacggaaaaggggaaaatcgatcggaagaaaaaggaagaggctctgtacaagcggtacgtcgagcgtgatgagctgggccaggagcgattcgtcacagagcacgaggagtgggagctggagcaggcggccaaggccaaggcacagatcaaaaaggccgagttcgtcgatgagggagactatgagtacgtcttcgatgattcgcagcagatcaactttgttatggacgccaaactcgagggcacgcaaaagccaatgacgcaggagcagctgcggttcaaggagcaggtcgatgcagcagagaagaaagccctctcgatggaggaaacccgcaaaagtttgcccatctatcaattccgtgatcagatcatccaggctgtggcagagcatcaagttttaattatcgtcggtgaaactggttccggaaagaccacacagatcccacaatacctccatgaagccggctacaccaaggatggcctcaagattggttgcacgcagccgcgacgagtggctgccatgagtgttgctgctcgtgtggcggatgaaatgggtacgaagatcggaaatgaagttggttatgccatccgatttgaggacaataccagcgacaagaccattcttaagtatatgaccgatggaatgttgctacgagaactgttaacagagccggacctgagccagtacgcagccttgatgattgacgaggcgcacgaacgaacggtgcccaccgatatcgcttgtggtctgctcaaggatattgcgaaagctcgacctgatctgaagctgctaatttcttcggcgacgatggatgcccagaagttccagaagtatttcgacgatgcgcccattttcaatattcctggtcgccgataccctgtcgacgtgcactacacttcacaacctgaagccaactacctcgccgcagccattacaacggtcttccagatccatgtcacgcaaggccctggagatattttggtcttcttgactggacaagaggaaatcgaggccgccgagcaaagcttacaggaaacggctcgaaaacttgggagtaagattccggagatgattattgctcctatctacgccaacctgccatctgaactgcagactaagattttcgagccgactccgcctaatgcgcgaaaagtggtgcttgccactaatatcgctgaaactagtttgaccatcgatggtattgtctacgtgattgatcccggatttgtcaaggagaacgtgttcaatccacgcagtggaatggaaagcttggtcgtgacgccgtgttcgcgtgcctcggccaaccagcgagccggacgtgctgggcgtgtcggcccgggcaagtgtttccgcctgtataccaagtgggcgtactataacgaactggaagagaacactaccccggagatccaacgtaccaacttgaacggtgtgattctgatgttgaagtcgctgggaatcgaccaactactcgactttgactttatggaccctccgccggcggagaccatcatccgcgctctagagcaactgtatgcgctcggggcactcaacgaccgaggcgagctgaccaaggtcggccggcagatggccgagttcccaacggacccgatgctcgccaaggcgatccttgccgccgacaaatacggatgcgtagaagaagtgctgtcgatcgtgtcgatgctcggcgaaggcagcgcactcttcttccgacccaaggataagaagatccatgcggacagtgcgcgcaatcgcttcaccatcaaagaaggcggtgaccatttgacgctactgaacgtctggaaccaatgggtcgactcggactttagcataatctgggcgaaagagaacttcctgcagcagcgcagtctgacgcgggcgcgcgatgtgcgcgatcagcttgccaaactgtgcgaccgtgtcgaggtggctgtcagtacctgtgggtctacgaatatccagccaatccagaaggccatcacggctgggttcttccccaatgcggcgcgactccagcgtggcggtgacagttaccgcactatcaagaatggacagtcggtatacttgcatccgtctagtacacttatggagattaaccctcgctgggtcatctacttcgagttagtgcttaccagcaaggagtacatgcgcagtaatatgccgctgcagccagagtggctggtagaggttgcgccgcattactataagaagaaggatttggagagtctagggttggatcgcaaggtaacgaaggggcagggggcggctggagagaagagtcgagagtagaacggataatgtagttgaatagcctcatataaaatagacacctcaggcactcatcttccaaccaatcaccgtccagataattcaaaccgcggcaaatcaaccgaacctcggtttctccgctttcccccagacttccaaggcctctccgaattttatacgtcacgtcagttactgatttcccctttttctctctcaacttctcaatctacatcctacctcaaaatgtctaaaacattcacccctgctgaagtggccaaccacaagactgccgataagggcctctacatcatcatcgacagcaatgttttcgatgtaaccaactttgtcgacgagcaccccggcggcgcaaagattcttaagcgtgtagcgggcaaggatgcctcgaagcagttctggaaagtatgtattctcttctttcttctttcttttcttcttgtttctctttaaaaccaaaatgttatatattgttatgatcggctatcgttcgagtcggctatcgttcgagtcggctattgaaagtatgtaactaacgccgtttagtatcacaacgaatccgtgctgaagaagtactcacccaagctaaaggtcggcgaagtcaaggatgctgcgaagctgtgaatattctattggaaaatgaaggaaatgatatacttcagtgttttggtttgggaggataagcccactgcgggaaaccccgatcagctgcacatcacataaatgtcacgatgttgtatttactccgctagcgaacgttatacccgtgattcctgtctgattattttgctctgtgaatatcaacttactacccggggcatgaatagaacagaatagaccaatataggaggttggaggttggtacatacagaaaggcttcattcttgctcataaccaagtcttatacattatgttcaaatataaacacgaagatcaatacctatatatctaggatctgctgggttgatagttggaatgtcaaaaaaataaacgcccttctccctcccgctgcacgagcaatagtatccgaatcaaagtggtatcaactcgaaaacgacaaatggtaaatgacaggtaatagatgtgtgaggtgagtaaagcagagaataaatatgaataggtgacggtgacaaaatagaagatatgtgcagtgaagatgtacgcagacaagccacggagagacatggcgatgaacctgcgccaaaaaggtgtgttgttgaaagaaagaaggagtaggtatatgataagtagtaagtaatgggcaaaaggtagagagagcgcatgtgaaactcatccactgtagaattagaatccccgccacggatcatcaggacggtatgagaactcgctgccatggaccgaaggcgtgtcaaactcataccgtctctcactccactgactggatgtcttgcggacatggcgctggcgcggaggcgcacgaggacgattaatctgttctgcgtggcggtcgatgaaagcctccatacgcacagtgcctatgtcaaacatgttgctgccagccccgctggaagcacggccactcgcctcggaagtgcgtcggctgatactgctacgacgacttccaatgcctggaggtggggctgggggctgcatggcggggaaatgtagctccgacgagccggccgtggtgccgctgtgtgaagaaggcatagtaccggcgctggagaagctgcggagagcgtggagagctgggggacggggcgcggtgttgctgcgtttgcggctgtgggttgagaaacggggaacgtggggtgcgtcggctgctaggtcgatgctgccccctgggatttcggggactggagccggagcaccggcactgttgaaggagcgtttgtcctttggcactgggcggggacggccctttgcgacccgaatggagtcgcgaattgggtttcggcggagggaggcttgaggtggggttggcgattcttcttgtgggactggaggtagagctgctaattcttggaggccgattgcggaatggctgaggaaggatagggctgttagccaaacgtagtggcgttcgatggttagtgctgtgaatttcagagcacgctgtggtgtcagcaccaggatagagcggttgaatgggatcgaagagccggcgcctttgggtatggggttgtcgtctttgacgtccaagacggattgaatcgtgactataccgaggcgagatactatgttagttgccactccaaccaaatcgaatgagttccttaaagacttacacttccggccacttttgccgagtaatgcaggcccactcgtaggctgtttactactccacataatggagccttcgtacggggcgagccaaacccatcgtttatgtcgcacaccactgttcgtgatattcgccgacacatcgtcagggttcttgccctcccaagtctctttggactcgcccatcccaaatgatttgcgtcgacggacgtatttgaacatccactcgccaaccatagtctgagcaatagcatcaacgacgctggttggctgcacaccaccggtggaatcctttctatcacactgttcatggttccaggtttgggatggagtcgtgcgatgcgagatgcgtttcgatggcccgtaccgctcacgaggtgctgtgatctcatcacacggcattggcggtggccgatatggtcggtatgcggggctttctggggaaaacgttgcggtcgatcgtgacggggaagaaagtgtttctggtctctcggtaatatccgactgtgacgttgctgctgcggatcgcactcggcggagagttgggcgccggacgacagattggcgaccacggtccgagaactgtctggtggctgagcgagtaggacttggaggcccgtcgctaccgttcagcggaaggttgcgtgagctgagacggatgggcacagggaatggcggtgcgatgcttgagcctgtactgccgctctcgaggcttggttcactgggactgcgggcacgaggtttctggtgcgcggcggttccgctggaaatcatggctaatttgcgcatgccgggctggcgaatactggtcataccagaccgctgggaagcccgagaacggccaatattgggtggtcttgactccggggaagatagctgctcgtcgatctcggggagaggcatgccgtccaaactaggtcttgatttcgaagtgatgagcttgccacgactgacagtgtatgcggcaaaagggcggttaaggagctcatcgtcggtgaagacatcgcgttcgccatgcgggccttcgtcatcgctgttattctcaaagccggcgaagagactgcttgaacgtagaggccgtcgaatattggacaaggtatcatctgagagcggaccattatcgttgttaccggggtacgcttgcacatgatctggaccaggtgctctaggaggcttcacgggatgatctgtcggctgatctgttatcagacgtctctgctttcgtttctcggaccgtggcggaaccgggggcacagtgcaaaactcgaggctaggctcttcgggttcagggggaggtagtgcatcttgaatagcagaaggaagaagactggcaggaagtctgacagggcgttgatcgaaacggatttcctcggtttggatggcgacggatcggcaatcagcaattgcccggaagttggcctggcaagcgatgttcttggtctgcggtggaagaacgacactatttcgaggtgaggatggctctgagcctggtgggtggatagcgatcatcggaatgtccatcttggatgaggcattgggggacaggttttcgctttgagcaacacatggttccggaacgacatcagtctgggtggatgccgatttcatttgcaccggctccggggtggactcgacaggctgaggcgagtcagccacattcggcgtccatggaggacttgggagttcatccacggtctgacaagaattagaaaccatctgaggtgcaactgggagcgtggcgctgtcattcgttctaggtattttcgttttctggtcgtcttctttctcgggctctgagacggtttccatgggctcaggaacaatgtcgtatacaaccttcccttctagcgtaggcgacggaggaggtgagtactggatgccgatatcgcggtattcaactgccgggtcaagtttcactgggctagcaagcccgagttcccgtgcacggagttccagggcagtgggtgagtataagtccgagctctgcagggaaagacctaggatcttcctggccttgaaagaaacactatgcgacccctgtgagtgaaccgacattgggcgttcttcgggcagcgcctccggagaggaaggcagctcatcatcagatgggacaaactcatcctcatcctcttcctcgaagtcgagttcctccgccaggttcaaacctgaaccattcttgcttccaggcgcgatactcataactgagtaccgcacgttatggaatatgaccgcctcttcaccttcttctgagctcaaggtggtcacgctcgtgcgtcggcggcctaggctactagatgccacactggctgagtcgctttctttattcttgtcatgaatatggtcactattctcactcggttgtgaacgcgagcggatagtcaccacttcctgggcggctgcgacctcgttcaaaacggtcttcaagcggccctctactacgtgaatcttgcgttccagggctcggcgttcatccgcccaggagtcttggtcgcgactccagagtaattgagttcgttcgacgtcctcctcccgacttcgggcttttttctgtgcctgctcgagccttttacgaacatcgccgatgttctcgaccgcttcatcgcgctcccgagctagctcggccatcgcagatgacgttccaccttccaatagttggatttgatgtttcaacgagcgcccttcccaggtcgcctgggacagattcgtggtcagtgtttcattttcagtccttgattcgtccaagctctcttctaacccatcgattgccttggttttgttctctatctcccgccgtagcgagagaatctccgatacgagagatgcatggagagtgggtgtgatcctccgcgggtcgaagggggatagggtatcctcggtgatatcgatatcatcttcgtctgtttgtccgtcgggggagaatgcgggggttgggaggccaggtggggaggaaggtgtcggggaggaatctcgccggcgcaaggacggtctcgatctcgatctcgatcctcctttggatggagctcgagatctggatctaaaggatggcgccggggaggggtgggccatggaaggcggccactgtaaatcggccatctctctttgtgaatgtgccggatgaaccgcctcaaaccatcgaggctctgctccttgggctaaccagagcacttcacgcactggatcccatcaaaagactaccgtagttcaaccatccgactattgactgctttgaagccggcgcttgtctctctccagagacaggttttcgctcggtgcaatcgactggtcgaacgcgggatggaggggaaattcaacgctgggacttttgacacttggtggaacgaagaggtcagccacggttacaatgaagatgtgtaagatgcacgcttgagcgcaatgccgatatttggatatgcacgggaagagaggccccctaactctacttacggagtactccagtgacaaacaggtctgaccgttttagcttaagagaggaggaagatgtcaatcgggaggtatggcccgattccgggagggaaaatagatcaacccgaaggatgcgagggccgatcgcgattatagaatcccctgagatccagtactctgtagatttacgccgtacggagtacttacgaaggtaatgacctgggaggagtcggggcttagaccattaaaagaccttaggggattagatcagccttgcggcatgcctgcgcatatcggaaacacggacgcgaggagagtcttggacttctaaaaaagaaagaaaaaagtcccaggggcgttcgttagggggcatatggggaaagaaaagaatccacccgattagcccacaggattgaatactccactgcagctgccagacactaagacagatgagcttcagtcaatatcccctgtataaaacgctttcagggtctgttcgcgcgagagagaatcaccagagtgtatggagtatacttggtattgtggtagatctcaaaggtcatggagaagctgtttatttggagacaaagaaacgaggaaaggtaaaaaaagagataaaaacggggccgtattctcaagagaatgagctattgatcagaaggtcggaaagcctggaaaaggaatatgagtgtactccgtacggagtaagattcatagattaactgcctggggtatgttgtaggagttcgtgacagaactccactgcgtgtctgggccatgaagctcaagcacttttttgacctgggaagatcaccccctattttgtttggcgaaatcatggaaggcaaaccataaaaataagaaaagcctttgcaatgaccaatagtttcgattccaaagacactaaaatagcaaaggttagcgtgtttgataaattaaatggctgtgttggcggccaattcgtagctcgtttgggcgacgatcgccgtacgcaatttcgcagagcctagtctggtttcagagtttccagggtgtatgtgtcgcatatgttgcacgtaacctgtcgcacgttgcatgttgtgtagtattggttcctttttgtgatgattatctctagacagtcaaatagtcaagaatcgaagcatctcggacattatcgcggatcaggggtaaaaaaacagacccatccaaggtctccaccgagagcttcgaagaacgaggaacccacattggccgaaatgaagaaccagacattcatccggacttcacaccacaatggatgtacgcgacactctatggcctccatggcctcggtctgtttctcttgcatatgtcgatgcaagtgccggtcgcacagctagcaaacgtcagaggtggcgtatgagaatcgccaatgattggcaataaatgctttattatcgtatccaatggacgaagtaggtacggagtcatgtctagactctgaatgtcaagcccccaaattgccattggaaatcagactagcagcggggtttgacacgaagtattaaggaatctccgcgaaccatttccacccatttgccccactgacctcaggggacgggacgccgggtactttttgacttggacgagggccgttgacaggtcgatattcgctgatatttcacattcctggtcggtttctttgtctgacagtgctagtggtgagtctagattggaggcgcagacaatacacggaagggctgaagctgtgtgcaaagtacttcgtatgtactccgtagggaaggtcacttataatagaagatcgtcgaattgaacaatagtcgtgatgattagcttgagaatgtcgagagcattgaaagaaggcggaaaaagaataggcagaatgttctgtgccaccttttttaagatctcgaagactcaacacataaaatactccaacttcttacaatgcatgtttcgagacaagtctctgagaactgattccctttccctttctccaataagatccgccagaacaatccggccgttagatctagagatgcgattaaccgggctgactaagcctatttgcgtcattccctggacatcggcatatatagacttatgttgtacatgtacatatatccagctgcgatctcaactttgttaatatcccacctggacagacatcggaaaccgacataatctcgaaagtgcggggaacagctgcatatcaccatcatcatccaacaccaactacataaaatgtcgacagacaacccgccccagatgttatttttcgatatgtttggcacagtagtttcgtggcgtacatgcgtcacggaagagctgagtgtggctgccttacatattgttaattatcccagcaaggacctcccagccgacttgcgggaccgtgctgcggccatgaccagtgacgactggctggcttttgtcgcagaatggcggcagacttacaatgtgttcactagtacatttgacacatccgaaaagtttatgtccgtcgaccagcaccactacaatgcgcttcaggacctcttgcggcagcgcggtctggagggcctgttcactgacgagaagctgtgggaactctctttcgcgtggcaccggctcaacccttggccggatagtgtgaaaagtcttgagttgttgaaccggcgctttgccacttctaccctgtcgaatgggaatgtctctttactgcaggacctccaacgtcatggatcactgcctttcacgcaacttgttagtgcggagaactttggggcttacaagccttctccattggtttataagggtgctgccaggaagtttggactggagccaggccagtgcggaatggttgcagcgcatctgcgcgatttgaaggctgccaagagctgtgggtttcagactatctatgttgagcgtgagctagaggaagagatgtcacaggagcaggctgcgaacgccaagactgacgggtacgtggatatgtggattgatcttgagtctgatggcttccgagaggtggctaggcgatttggggttgagtaagaccggtctaccctctggtctggggctagtagttgagactggttccggtggacaacgtgtatatttggacaatttgaatgaatactcgaaatataatcggtccatttagcccatcctccattccgacatgtattttgcctctcccatcgcctcattccaaatcccccaacatcaagcccaaaggatattcaattttcgccacccagtagctggagaaggtataggttctggattttcattcgcgatgtgaagaaattcgcggattggaattccttccagtgggacaagccgggtctttcgccaaaatttgcacccaaaatatagggcaaatataagcggaatattgaagtatgacgatacaaagatctgagaactccaattgccctcaataaacacatagaatccacccgtgagcagaattatactgaaagaaaccagagaaatccatgccgcatagggttgaaatgggctttgccaaggaagttcagtacggctaatcttttgcttcttacagccataaaaaaacctcaaatagatcacctctatattgatccaatgcaccaaagaggcagctgagaccagttgctggagccaatcaaatacaacagaagctgcggatgatagcgtcatataccccaaggcaagaaaagatccgactgcggcaaccgatatccaaggaaccccgaagcgattgatgcgagtgaataattctggggcatgcccctcttgagcaagtccatatagtgtcctggttcccacgagcatggctgtatttgggtaagcagaagtacagcagccaatggaaaaatgcatactcaccagaattaccagcgctccatgcacttgtgacaacgacagcattgatgatcgaaggtaccactttgatcccgacattagtggcagcaatcgcgaatggagacgctccagcatccccggaatttgacagcaaccccttatcattggaggggacaataaggcccatcatgaaaatggtgatcagataaaatatcaggattctccagaacacacgtttggcggccttggggatgttatgccgaggattctgtgtctcagctgctgcaaccgatatattctcgacgttggaaaatgcataggctgcactactcaagacacgccaaaacccaaggaaccgtccccatgagccgttgattccgagaaactgcacaaagggtccagggtctcgccaaaatcgaaaccccatgggataaccccgtggacctgcgccagaggtaatgcatacactctatggaaatcagtcaggaactaaccagaatattgctcgagatctgctcaccatgatattcacaccaacaatcagagcaatcttcaacattgcaaaaacaaactccaactcgccgtaaatactgaccaacagcatattactaacgatcagcagtgcgccaagggcgctaatccatactgcatggttaatatcagaccaaaagtcgatgatgacagcgcaagccaccatttcagccggcagcaggatagcatttgcataaacactattccagccttgtgcaaacgccagagcagggtcaacgaaccattcggcgtgtcttatgataccaccggaaagaggcgccagagcactgagctcagccacggaaaagaccacgcagcatataagcatacccacaatgcaatatgccagcaacatgcttagcggtccaccccttgctaaggattttccggtcgctaggaagaggccagtaccgatggtcccggccagggctatcatttgaatatgacgttgtttcagccctcgtcttgtttgaacgagctcggaaatgactgcctgtgttttagggttgtcttcacccgcgaaggtacgtttgaggagaggtatggcctcattttcactggtaatctcttcattttgctctgagtgctgagaatgactgttcatttcaaatgatcggatgggaggggcaaatgaataaaagaggacaactaaaagggtgaagaggggttaaattgagaagtgttcttaggcatgtgtgtggttggatggtgataagttaagaagaacttatattgaagtcgtgacaagaggatgtttcttattggtgcatgacctgcagccccggcccggttgatattgccggcaccaaaaatggaagataaaggatatatcaccttttctttcttcctcgatataatcttctatcctactttccgctttggcttttcggaacctaggccaagaataatcttagtagaatcgccggagtcggtaacattgaattattatatgtaccgtgctgaagacagtcgtctcgaggcaggacagagagtagtgtggccgtattcctattggtaaaatgccgagtaggagagttaatgaatctggaatattctctttattaggaatataactacctagaggcgctcctatgatagctttaatattataagagtataagctttatattatttatagttagttttaaaaatactgctaaattccactctttccttactatctaatctcaggcagtggcttactataccctattcttatactatcggataatctcctttattatcactcacttttcactcacttttcacaccctccgcacaactatcgtataaatataccttcatcgctaaaccatcgagtctgcactgcgggactaccaggcatgtataccatcttcgattgatactaggagaccttaatctcgcaccccaaacattcaagttccacctagagagcactagagccgaattgctagcgaaagatcttaattcaaacaagatggcctccaagcctcaggactcaccctcttggatcactgaagatggtagcccactctgcggattctactggatgagaatcgatccgaaagtgcagcctaattactgggtgtaagcatgttttccctaggtcctttggtggatatttgctcacgcataaattctgaagccaacctaagaaattgtgcgaatgctgggagcacttcccaacccagtggccggttgaccatgtaatgatcgtgagaattctaaatcaagtcgccctaagaggtaacctttccatgactgactcttgtcggtctatcaaagcaaatccctgcatgtgccttcaggtgcccatattgcacggcactcgataacgtggaaaaggagggacgaccttgcccggtacgggtgaaaagacatatcaacgcagcgcatatcgtgagtactccagtatacttacccagggaatgacgctcatatcacttagagaagacaaagagacttctatatgggactacagatttcctgtaagtgtgcctcaaagtcgaaagaagtctatgcatactgacctttgctgtctttagtttcaggttgcttccagtccaatgccatctcaactcgcagtgcagtgaagaggaagtcccgtccgagagcccacatttacaatgtgcatgagaacaggtcgccatagttatcttatgaaccggctgaaaggacacatgaacaatgaaaaattgaaccctcaatgaagcccagagtctagacctctattgcagggcttggttttattcaacatgatactggcacccacgagggcaataagtgcaatgagaagataggggcgtatgataagaaatatttatcactcggataccagcgggacttcttggttagtttctaggtaaacggagtggacgaggattccaaaggcgtgtctgttgtatcgacgaagaccctgcgatcaaatttggtcactcagcctatgcttactggcttgctctatttcggcgatataagatgagtgtttattgactttattgtctaacgagttgatgctgagattctgcagttgaataagaccagcataaaccccttgcttgaccataagttcagtatgattcccttcttccaccgcccatcatggtggttttatcatctttgttatactagaaagacgatgtgcaatcgagatcatgtctccttcagagcacggccgcgagaatttccttctcgctactggagtcgagggaaactgtagctatattaagcccaaaatcccttcaagtccttgagtagagctcacgcgaccgagtttcgttgcttttggctgtctctcacaacattccgttggagcccacgatagtaccgactcagagagccgataaacagtgctgtgtctgtatttcatttctatgagcctgtacaggcttgagtacatattagctacctcgtgttataatagctactttcttttgtttctgtttcacattggttagatgctgttatagggatgatcaacccaagcgaagtagtatcgaagtcaaacgccgatatcggaaaatgccaatataataccaataatacacactagtaaaatatatccaagccctaactcccatcttaccgctcttcgcgaagccggtatcggaacatcgtcgttgcagctccttatctgatctcttatcagatctgacgcacattgccaaactagtctgcacctgggtattggtaccacctgcagcacacaatatctcgtaatgcaactgaaaattctcactccaccggcccagggagaacccggcgtgctccaccactgtgtacatcacccacccacccccatagccaagtcattcataccctaacgccacctcgcagaccaaatccctcgtcgccttcgaatatacccgcagccatgtacccaagccacacaccctcatctttgtcggcggactaggtgacaccctcgggtcagtcgactatctcagcgacgtagtccgagcgctagacccatcgcaatggagcgtattctcgctgatcctatcctgcgccggcggcgggtggggcatgggccgactgggcaaagacattgatgagctatcacagtgcgtctcatacgtccgaaaatataaggagccccaattcggcgtcggaaaggtggtcatcatgggccattcgaccggcagccaggacgtgatgcactatattaactgtcccaacccacggccagcacaccctgtcttcgaccgccactggaagccgattgtgcgggtgccagttgatggggcgattatgcaagcgccggtttctgaccgcgagggcatattgtgggttgtgaaatgtggcactgcgcgtgatagcccggccaaaatgcgcgcgatgtacaataaggctgttgctgatgcgcggcgggcgatgtatgaggatcacgatcttgttgatacggttgtaccattgagtgtgacgtcgcggattgggtatccgccctctgcgccggttagcagtcggcgtttcttgagtctggctagcccagatagtccggaggatccgtctgaggatgatttgtttagttccgacttaagtgatgagcggttccgtgcgacatttgggatgattcgggagagagccttgctgaggcagaaaatgctggtgctgtactctggaagggatcaatcggtgccgccatgggttaataaagaagccctattgaagaggtggcagattgctgctgatgggagtgggcggcaggtctgggattcaaggagtatggttattcctaatgcatcgcatgccctgagtgatagcgatcaagcggagccgcggcggattttggtggagagggtgacggcttatttgaatgacattcagcgtggatgatttccgccgaattggtgagattgtatgatatttaagcaaaatatatttgatcctcatatgaaagagttctcagaatccgggaggtcaagaccaacgaaatagttcaaaacaactctaccctgtaagtgaataaataacggtacctgcactggtgaattccgggctaaagacatcgactgtaagcctaaggcggctgctagttgtaccgaagatagctctagtagtctagtcagaccagccttgatatagtcaacttctactgcgaccagttattgtgcaactatctgcatgatgccgcaccaccacactagtactataaactatggcgaattgaatgaggacactattattgatatcgactccgatatagctgacgatgaagcgcggccacctatcttaatgacgatcttgacagcttttaaatatggtatgcctctattcttacccaccacagtagtcagtctaaagcggttaggaacggcagaaatctcataacaatcctattcttattccactaccgaggctgaagactaaaacggcaataagattacaataatcctacatgtttatagcttaagccttttggccacatggcttcctcccctttctccacaaatattgatacatactatctattattgagccttgacacgctcacatgatgttgaactagtcccaccagcatcgttgatccaatcaatagcgtaacgggaggatcatattattgaccccaacacgttttaaaggcatatcgtcggggatctttcgggcacttggcacattgagatcgacatctactgtgtctacaatactccgtatacagtgtgcaatatacgcatgtgatcggaacaaccttggaaagatggacaaccccctcgagcagtatttaagtcacggatcaatattgaagatcccccaagccaagatcgggccgcaaggaataattttgaaatgtcacatcgagtccatttccaagaatcaattagtttcccaagggccaatctgctgggaaccgccctgccgatcgctggaagccgcaacgcacgacggatgcaacacatccacaaaccaatgacagatatattgcagattcaggggatatgaccaagagccgttgcatcatgcacgtcaacacaaggcaggtgcaaaccgaatcccgtcaccggtactcctgagccgatatgaacaatatgctcgagattagaatcctagaccagggcgagaccatagcggatcgttgaacggcacaaattcagcgttccccatataacggccaggcgggaggagccgttgaccaaccaacccctgccccttcaatgaaatgcacggctactgatggtcccacggaaagagctcccccttacggagtagcatggcaactgagccgttggcccgggccattccgtgtgaacagggggatgaaaccatcctaggacgtgccctagcaagttttgatctttaaatgctatgaatatgctgatatgagaatctaaaatataactgcagtttagggttcttctcttgaaagttgaccggaagaggccgagccgggatgtacttctttcagagaaagagaaggagaaagaactggttccgcccgggcccggcctattgcattcaaccaaaaaagtggacggaaacagtttccccgatataactcctcccctggcccgcggccacagaactgggacgggaaaagggagccattccggatcctacgagttgatgcccaaccagttgcctactagggaaatagagcagcagatttgttcgatgaaaagtaagaaaaattaaaataaaattcaagccaagcaaattcaaaaaaaaaaagaactcatacaacaggagtacatagtacatacccaccttccgaacttcctcccgttgtcttcttgcccacctttgtagctagcaaggcccctaggacgatctatgtatcaatggggacacttttttttttttacgcgcccctccacgggtggacattgcaatggcatgaagactttgacattcaccggtgactataggctatttgaacctattggccagatcttaggttgtataccggatgcatgcgcaagagcggaaaaatgacagtgacaggggtcgaatggacagggggtataacgtggaagggacgataacgagagccaatctaaggtggccatgagccatgactcgatcctgaactagttcgaggttggcgttgaacagtcacagagatggatgttccggaatcccaaatccacattcatttgacttacgctattcgggtagcgtctcccagggccatggagagagggagacttttgttccagggtgttataattgtaaggggagtatggagtacggatactttgatagtacgaactcccacgtttcaaaaaccacgagggagatggggacatcgtgtgccaccatcgacactaatttaattaatcccattctaattgcaggacttgagatagtatgtacaacataaagagaacatcccatgcataataaataatacatcttcatggtagggcagtgaaaccatagatcgtgcccccccacgtgtagattggggtacacagtgccttagtttgagctgtacctagacgaaccggcccaaattgttaaattcaaaacaagaagaaaagaaaaataagaagctctcagcttctgccggcagggaaatgagcttcagccaagttacggagtacggagtacatccgggattatccactgtgccctgtgcgcttctccttttcactgtggacctttgggacctgggctttttctctcttttctgttcttctttctttgggttataactttttttggggtatatatgggtatcttctggctcattttctccgagatcgtcggatccggtgtaggttcagtggaatgggcgtccagttccagagatcttcggatggacggagtatatagatggctttttggggtatattaagataatgaaagggtgaacagaagaccccaaggtaaatatataaaaagaatgaataaatgaatgagtatcagcacagccctagaaacactatgtggatatttagaaaatgtgaaagaaaatgtatgacttcatggagctgtcacttgggctttttctccctaattataagattcctaccagtcagaatgaactctccgatgtctttatttttcatgtccttttataggtctagctctgattcatttttttcctttccacatccgaaacggtctcagagttagcgatgtagagaataacgaacgggggatagggatctcgggagaagtacaaaatccattctctttcataaatttggtatttttatcttctattctgttcgatatcctgttcgacatttctctttccttaatattctctatactctaattctaatctcctaatatcctcatatccctttcccttgaacccctctctccacttcgttccagcccccggaccagacttcgcacactggtcttccccctctctctctcttgtctctcggctctcccttctcttttctctaattccattttctctcttcccttcgctctatatctccccctttgcatcattcttccggcaacaattgggggttgctgtgaatcgcgtggaagctcccgcttttctttttcgcccccccgcctggaacgtgggccacttcactcacctttcccccctccttgcgacttcgaacatccccccctctttcccctgaaataattataggtatgtcgtggacaagacggtatcgctatagacgtactgacttctctaggctgattgtctttgctgtttcttgttctcagttccagttgcccgccatggctggaaaaatgacgttgtacaagctggtggtgttgggagacggaggtgttggaaagaccgcccttactattcaggttggtcgacctagcccttgacctctgggcaacaattcttcatgacccatgactaaaacctatccttctagttgtgtcttaatcactttgtcgaaacatacgatccaaccatcgaggattcatatcgcaaacaagtcgtgatcgatcaacaatcgtgtatgctcgaggtgctggacacagcgggccaggaagaatataccgcgctacgagaccagtggatccgggatggcgaggggtttgtattggtgtatagcatcacatcacgcgcctccttctcccgcatcacaaaattctacaaccaaattaagatggtcaaggaatcgtcaagctccggttccccctccggccccagctacctgaactcgcccatgaccgcctccgcgggtcccgccatgcccgtgcccgtcatgttagtcggaaataagagcgacaaggccgtcgagcgcgcagtctcagcacaggaaggccaagcattggccaaggagctgggatgtgagtttgttgaggcatcggccaagaactgtatcaacgtggagaaggccttctacgacgttgtccgcatgctgcgccagcagcgacaacaggcagcaggtggccgtggcgcagaccgtcgcccaacaggcttcggatcgggccgcgatcgcgacgcaggccccgaatatcccaagtccttccggcctgaccgatcgcgacatcgcagtcggctccagtgtactctcttgtgatcggccgggtccgtccgggaggcgttggatttcttgctcactgaaataatggctgtttcctttttctcttttcctctcttccttttggtcccgggtgcatctggagggtggttctatcttttggttacttcgttcggcgtcggtggtccttgccatgctacatcttttacgctcgcattttgaagagcttgagaaccgacgtggagatttgaggccagtgtctgcaagcctcgagcgcaaattttttcttttttgttttggcttttgttttgttctttcgaaatgcgccgagacatgcagactggctgtctggatttccacaagctccgcttactctttttccttaccaatcgtctctcttcttcggtctctgcttatttgataagttgcgaacggaggaatctttcggacacgccttggagcaccccgacagaaacaaaaaaaaaaaacaccccccaggcaacgaagccagaagatcgcagtcgcgcattagcaggcatttcgatatgataccctacgactgagcttgttttatttgattaatttctcagccatttatgcgatatagacaattgataaaggtcttttttttcagtcggttgtaataatttggaaaatccgaagcaaaagtacacctgagtacaagtgcagtacccgattccaggccgtacttgagacagcgcatgaggtatactccgggtatactctgggtatactctgaggctggggacaagctgagtacagaagaaagtgcggggaaaaagcacggactcgcctcggctgcatccgggggatctcagcttcaccttctccccgcaaatggcgagtcacacacacgaacgcctaaaatgtcttgccgatcagagccttgcaggtcttaccttccatattcccgtgccaatcgcaatattggatccgaaacacctcgggtagaagcgctctatatcagagctcctgagtactattctttgtcttgtatgagctgtttctctcttctcggctcaaatcacaatcccggcaaataacttcgcctcttcatcatttctgtagactgaatccgaaacctatccaacatgtcttcgcaccctcaaccgacaacccactcacattcccttggcgatccagaaaccttttggtcccatcatgcggccagactccactggcaccgcaagccttcacgtgccttgacgcggcagacaaagtctctcccgagcggaaccgagcatgagcactggtcgtggttcgccgatggcgagatctccacaacctacaattgtgtcgaccgacatgtgctcgcaggccacggtgacaatgttgccattgtatgggaatcaccggtaaccggtgtaacggagaagtatacttatgcccgcttactcgatgaggtcgaggttcttgccggtgtacttagggaggaaggggtaaagaagggcgatgttgttattatctacagtatgcaattgtgaccacaccacaagtggagaattgattaaagacagaaacccactgctgactacgtatcggatctagtgccaatgatccctgcggccctagtagctgcgttggcaataacccgcctaggcgcaattcacgccgctgttttcggtggcttcgctccgcaagctctggcacaacgcatcgaggccgcccgcccaaaagttctaatgacagcgtcatgtggaatagaggggtccaagggacccatttcatatcggccactcgtcgaaggcgccgtcaaggcaagcagctttaagccgagcaggatcattgtctggcagcgtgaccaactgcgctgggatcagcccgataagcgcggtggccagcgtaattggcagagactcgttaagagcgcacgattccgtggggttaaggctggacctgttcctgttaagagtacggatgcactttatattatctatacaagtggtgagtgaatcccagaaccgaacccaattcctgatctgttttgttcatacttaaacgtttccacaggaaccaccggcctccccaaaggcgtcctgcgtgaagcaggtgggcacgccgtgggtctggaactctccataaagtcgctcttcgggatcaaaggtcccggcgacacaatgttctgcgcatcagacataggctgggtcgtcggacactcttacatcctttatgcaccgctgttagtcggcgccacaacggtcctgtttgaaggtaagcccgtcggcacgccggatgcagggacattctggcgcattgtcgagaaacacaatgtaaatgccctctttacagcaccaactgccatgcgagctatccggaaagatgatccggacgaccagcttatcggcgaggtcggaaagcgcgggggattgaaatctctccgtgcccttttcctcgctggtgagcgcagcgagcctggtattgttggctcatatcaagatcttcttcggaagtatgcagcggatggtgcgcttgttattgacaactggtggtcgtctgaatctggatccccgattacgggtgttgcattgaatgggagtgctgcccttgctagtctggcatccgggccagatcattctcctctcacaacccgacctggctcagcaggtttcccactgcctgggtttgacgtccgcatcgtcgatgacgagggcagtgaagtcccgcgcggtactatgggcaatatcgttatggcaccaccactcgccccgtcggcattcacgacccttttcgaggacgaggagcggttttaccgtgggtatcttaagcgtttcaatggccgctgggtcgataccggcgatgcggggatggttgatgaggatggctacgtgcatattatgtcgcgaagtgacgatatcatcaatgttgccgcgcatcggttcagtaccggtaaggaagttgcctttctttcgctttctagattattgaaggataaacgatttgactaattcctacaggatccattgaacaagcaattctctcgcacccattgatcagcgaagcaagcgtcgtcggcatccccgacccgctaaaaggccaccttcccttcgcattcatccagcccaaagccggcccaatcactggaaaaagcaatcctcttccagcaacaccgaccccgcagttattcgccgaggttaacgcgctggtccgcgagcagattggggctattgcgtcgttgggtgggattatacagggtcgggggatgatccctaagacgcgaagtgggaagacgcttaggcgtgttcttagagagcttgttgagtatggggtgaagggggagtatgcggcggagattaatgtgccgcctaccgttgaggatgcggaagttgtttctgttgcaagagagagggttagggaatattttgaggagaaggagaaggcaaatggggtcggcaaggcgaagctttagatgagtgatagatggatgtgactatgcggcacattagagcgatctgctttgactagtacttgaatgtttcgatacatcaaggggttcataaagaagctaacagtcttcagcatcatgcttatcttgttataagttatttagttcagcgatatatgagttgaaggatcctgttcaatggattacatcctaactcgacaagaaatttgaggtgtagtaaccaagtccgatcaatcttctgtagaatacatcgtgggcagcccctataatcagctgccgtagctagcatcatacaacataccatccttcccctgagctactggtgtaacattatgcctcaattttaatgcaaactgctggtaaggtctctacgctgggctcacctcatataaaatcgaaatctccacattcctttcccgttacatcctcgctctcacagagctgaggagaaagggtttgtcatctccaggaattacacccgcagttgccgtgcactcttacactcgacaacgatatacatatctcatattcataacgaggatttgtcccaagatttatgaatacaagttgcaccggatgttggatatagtcaccttccggatgccggtagtggctagggttttggactatcgaactgcttgtgtccgccatgtttacactgctcgagcaaagacaacaataatttggtggcctatacttcagcagagggtgatatacccaggaattgaagttataccgaccgtatagactcaattttaaagctacctggccgcacaaaccgcctttatacgaaggtcctgggtaatatcaaagatattcccactacataaatttctaaaatctcccatttctaggcgttaaagcctcttgaggcaatcgaccatgtatcgttaatctcgtcgattctactgccccctaaccgtatataccactatatatccttatcgtcattgatcctcattgatcccgacgaaaaacaggatgtagggtgtgaatagcttcatgtttcaagcccttaaggcgttcttaaggatcctgatactctgcttactaggtaggagattgtcatagaaatacgctgcacaattttccgtcatgaagctattcccatcatacaaatctctgtattcccccaggtctagggtggtttgaagatgttccgatcgtacaaatttagcttcgggctttagtatctcgcatttgaaagggtcgagatcaatccgtagaggcatacattgacgtgcggtatgaatagcttaaacgccaggaactagagagagatggagctttgtacggtcagaagaagagcgtcaacgtcaaatccgagggaaatggagatttgtatagaatatcttcaatgttgtgcaagaaatgtagatttgttgaattcaagagagagagagaagagagccttccttccgctcttctctcccctttctcgtgactttgaattctcccaatttgacttctaccacatctgacatgaatatttcacgagttcccagccttctcctcctttactcccctgctaatcaagtagtaatcaaatattacactggaggcattcaggaatgaattctttccagctctcttgccctccctcctttgcatttccaactccttaagtctccactctggtcacaatggagatctcaccttttgtttacaagcttaaaatcctgaccggtattcaccttgtcaacttccccattccaaaatcccgatcaccgagtggtctgaagggcacacatatgacgaggtgagcgaagattgccccaagcatagatttctagatagacaccttccatagccgatgtactgcttcatcttacccgtaccgcccacgtgaccgcatatcccgctatcatattccttcccctgagctatcagcgtaacattacagcttaaagcacgccaaatatagaacatatttatgtaaaagtagactagatcaggtaaaactcaaagtgtttgcccttgaacctctcgagctgacaggcgagaaaggccgttcttctgcttcttgttattcttcctccactgccacctttcattccttgttatatcctatgctccccctccaagatggagccaaccaagttcccaaagagacccacggtgcgatgggacccatacaagcgacaggtactctgctgtttatatcgattctttacttgcaacaagaaacaaaccgcagaaatattttcctacatgtttcggagccatctgaaacagcgtggcattcaaggctttgttccatttgccacccttaacacccaatggatttggatgagaaacaaacgggatccagtctggctccgtgtgcatatcaacaccgcatttgagaccagtggcgagtggggggagattattacaaagatcaaatctgcagccaaaactttgcggttcgaactacatgagaagatggaggacgatactcacccatcgcgctgtggtcctttggtgcccgatgccgaacagaatattgcatccgttagtgacctcgaacacgtccaatctgcatgcaagctaacgatttattctcctagcatggacccgctgtgccaatgctttcccaatcattgtttactgcggagactctcaatccaataccattgttgtccccgagccaggaccaagccttcgaaggaagatacagagcgaaccaaagcgccgatcagagcatcgaccagagcatcggtccgcagaacgaccttcacattgatatccccaatagaccccacagatctaccgagccggtggtcactagcaacggaaagttgtgcctctggtgtgagcatgaaggaactatccacgagtccgaggacatccaggaactgcaaaacgaagactacgattacgacagtgaatatgaggagcatagtgatggcaatcagcataatgaccgacaagacgatcctggtatgacagattacatccaaggatgcaaacagttcgtgagggagctacgtggtgaagaattgtttgattcagagagcgagccgtacctgttgaaaccccacaaaagcctctcaagaatgcactcattttgcgacccgcacttgcccttaccgctaaacctagaacaagggtctctggattcggaggataattcagattggtgcgctgacagaggaatccctgctaatttggctgattttgggagcctttcaatcgcaatgaaaaatcggagcggtgcccttggcaatgagcgaacttccacacaaaaaagttcgcgcagtttcagtttctcccatacctgcacagatcacgatgaggcgctcggcgaccgcttaggtggtcagaacgcattgcagtatgaatggccctcgaatgatagaatgaggatggaaaccctgcgccagatgtccgtggaagctctccgtcaggttgaagaccagtcaaccactcacctatctcaggaggaaattgatgtcttgatgtatgacggcaatacctggaagcagttgtagggagagtgagatgcatatacataatggggtctagattcaagtgtctcatatttcacattatcgaactaggaattaggcccctaggccttaaacaggaaccttggtttttgttatggtctagtggtagaatgtgctgtatactttccatcagacaccaatgtatcaatccaaattttattaatttgataccaagttcaagcatgggctattatgctgtaggccgctaaaaagtaaacagcctttgcatttctctatcaatatgctaatcttgactttctcatgaaagaaggcgggctcaaaccagatctgagacgggctttttttgtcaggtatgaggaacataaaagggatcaactgaaaagctatcagaaaaacagaagagaaaaataacagtgaataattggttagctcaacctgaaagaaaagagagggaaatatccatattcaatactcatagagtaacaaacatcaatgatggctttagggttgaaatgttgtagggagaaaagggatggggatcgtgtgagggcggggataaaagagaggatttggtggttatggtaacaatgaaaactagaaattgcctagttgactatcgagaatcgtgaagattcgaaggttaaaatgaaaagagagatgtagtttgcttcatcaatatatctggaagtcaccagatgcacctaactcatgttgaaccaggtaactatgttaaatctttcagctgctcctcaaactttgcccactgacccttcaccctacatgcagaagtccagtagttccctttctcatcctttccgaggataaaaaacccgtccgcaggcttcacagggccgtgattctcctgaacatatgaaggcctgcacggcatgctgtcgtctttagggccctgacgagccggggaaaaatctaagttgaacaagccagctttcgaccaattggagaagccgacctgcgccatgccaccatctccaaatacgataataggtagaccggttccggatgtgcgaaccatggcgtaatatgcctcatgttgagcacgcgtgccctgctcgttgatagcgcaccggacctgctgtgcgagccagctgagcggcttggaagttacatcgcccgcggtaacaagtacgttggcccagccgaaagcgttgccaacgtagggatgctcggtggaagcaggcaggaggtcaccctcaaaagatctgcggagtgacatggcgattgatgtagctacctaaggagggtgtagtgtgagtagcttatttaacagggttacagtattggagtttaccgttctctcagggttcatccccatctcgccaaccacacagcgtaaaatccaggccgtcagaacatcattctcagtcaaaaagaccttcgatgggtcttcgccgttcgcagtcgcctcagtacaaagctcgtctacagccttctcccattgcggccgccaatatgtctctggaatacagaccatgcggttctccttggctcggacaagcatatcgaccccataacctaagccccaccgcagcaagcctcctagcccgaccctcctgtcagtcaacacatgttcctcggtcgtagggcgcgacccctgggcgagagagtggaatggatccgagtttataccacatgggatcaatacttcggcagtttttccccaaagcatggagctccatcctgcgacgacatactgcatgcccagcgcgtcgaaggcagcatgctgccattggagcactacgacggtcttatcggtgaaagagttgacgcgcaaccctaagacaggaaggtcggaggtgaggtagtcgtttatcccgttgggcttgtacccaggctcccacgccaggccttctaggtcatctgggtcgctaacaacacagggccgatcttgcggcttcgggattcgagaggccgtcgggtgtaaagcggcaggtatgccatgattgacatgggcgaaggatattggtggtctgccgatcgagaactgggctggaatgtgccattcgatcttacctgtggcctatttggtaacgccaaaagtgttaactagtataaacccgtgggcacttcatatgtttatgcagccctagattttctctttgcagatggcccattcttacattcttcctcagtcttcctcctaacctttgccacccctctcgtttgacgaggccctcaagggattcgcgcaatatttctgggtcgagcactgcataaaacacgagagatacagccatgttattaccctggacaagccaactatcctcgaagaaatggagtggaaccactcgatcgcccggaattggctccatggtgggctgacgccaaaacggcattttcatggtgtgaattgctctatcacgaacagaaaccaggctgcctcaaagaaagattactgcaaaatacttctttgaacaaaagaataatcacatgcattatgcagctggaaacccctattctaagttgcaggcaaaaacatggcgcgggggccatttcgttgttctttgaaggctagatctaatgtgcactatactagtgtcgatctccactcattctacttgagaattgacaagtctcctctcatgatactttttgctagcgtgaaataagtaccatttgtggaggagatagaaaggtatatttgttataggctaaaaaaggatagtctacagcagttagctctggtcgcaggatgagctagggcaaatgagactccacttggattttacgaacctccgatattactggctacagtggtttgctacggttctggatcaactgttgacaatgttttagcccgcgtagcaagaaatttgccaacactggacggggttttatacaatagtatataggggtagaagacctatattgatatagatttaattaactccacaatcagatacaatggatctggatacgaccccaggaataccgccgccagatggccaggaatcacatttccatgaaccctataactcgttgcaaatagggactgtcatcgcctttggcatcacctatctcattgccacggttttcctcgctcttcgctatttccaggctttcaagctgaccaagaagatcgagatagacttgagtaagagaccaacttcttcaacactctgctagacacttattctactcgatagtcactatcacgatttcttatggtgttgcactggtatattttgtgactgtggttaactgcaagtctcccgtgactatctttcgggttaaggtataatctgactcaaatagtaatgaactatggctggggaaagcacatgtggaatgttaacttggaagatctcatggggtttaataaagtaaagacattatttgcataccctagcacattggctaacaagatgcagggtctactcatcaacaccttgacttatttgatatgtccatgcatcaccaagatggccattctatctgtcttatttcaaatcaatcctgcgaagatatatcgttgcctcgtcgtggctgtcgcactggcgatctttgcgtacactctgaccttatgcatcatcaccggaggaccatgtaaccctctccatgcaggaaccacagcctgtctagaaaatgtcgccttatcccaggcagttctgaacattgcctctgatttggcagtgattgccatcccgatcccaacgatacaccgtctccatttttcagagaaacaaaaggtcacggtcggctgtctgctgactttgggatctaggtgcgctttccctcattcttgaattgttctgatgccatgattgccgctaatccccaccccagtgtcgtcatttgctccatagcacgcctaccatacgtcttactcctcggcaaaaccgctgacacaacttataccgaagccatcctaggagtgtggtcccttgtcgaggtcaacctcggtatcatatgcgcctgtgcaatgcggttcaagcgcctaatatcgatatatctaccgcggctttcgctatccccatcgcacacgccccgtactgcgaaactcacagaggacacacctatgaataggttccagcccaaaaatactggagggcaacactcataccagctacacagcatccatgatggaaatcccaatccgttagctggcacgaaagatatctccgtccaccgatcgtttaaggtggatgaagaacgtacatatttgtaccgcagagacaatgatagcactgacaaaattttagcttgagtcacatatatgtcaataacttgtgtatatttatatattttgcttttacatcagtctcatcacctattggtatgcacgatgtagaattctaccgaaatacccgtggttaaaagatctccacgctcatggcttgctgctcttattgggaatgaccatagaaggtcagttcacgtaaatccaagagctgacggcaacctactaaatggacacaacctaacgcagggtgatgactacgacttaatctgcaagatattcgacattccattctcgtcactgtataagtgaaatccaagcatcggtccgttcatgcaacccaaactatatggtctgctctgctaacatcctcctaggctcggattgcactaatctctggatgaacactcctgtgggttaacatatcatgaccatcgaatgattatctttatactccgatggcaatacatcaaaacaagtacaagtagaatatcggggtccagtgcaagtaaaataagtagaaagtaagagatcattcttgatcgaagttaaatttgtgaatataataaaacgcgctatgtccaggagaataatgcgcaaaaaaacaagaaaagataagctccacaagaaaggcagacatgaaaagttaacccaagagggctcattatgtattatctaagacgtagacaagacatatacaccagaagaacccacagccgtaaaaacccgacagcatcgtgtggttttcatcaaagcgataacaccagtcacaatgctatctcttcatgatgccattgacaatcaactgctttacagcaggagagcaacggcaccaaggatggcagccaaaccggcaccagcaccggtagcggcgttcatggcaccggcgttgaaggcgggctgggagggggtaacagcgctggaggggctggagggagcactggaggggctggagggaacgctgggcacgccagtggagccggcggtggggaccagaggggtggaggtgacgacgctggggacgacggggatgaggggagtgctgctgctggccacggggctggaggccaagggagtagagaccacgggagcagagggcgcgggagcagatgccacgggagcagaggccacgggagtagagaccacggcggtggaagagctaagtaatgtgttagattaaattaattggtcacgttggatatagagaaatccttaccaggagttgcactcagtcacggtggaggtcgagatgggacgggtgacagtgtaaggaccgtggctcatggtgatgtagccgggctggaatgctgttagtatgcggcgaagacttgttgctcaggaaaacatacggtggaaatgctgtaggtgtggcttccgtgtacaatagaggtagcctcagggcagtaggtggtgtactcggtgagggtctcggtgacaacaccggccatggcaccagtagcaccgagagcgagagcggcaatagagaaacgcattgtgatatagttgatagagttggaatggttccgaaaatgttccaagatgaggtatgtaaaagaatgacagggattcaaaagaatgtaatcggttgaaaaccggggatttagagaatgcagtggaagaaagagagaggaaagaaggggggggagaagagtttataaccaatcctgtagattaatttaaatgagattcaggtacccgctgccactcacacactgaggaaaaggggcagatagagtggcaataagagagtagcgaaaaataaacaacgaaagtggattggagccacatgggaggtacttaattgtacagccaaattaatacgacggctaaagtcacttcctccctagcgttcctcctcaccttaagcgcacgctccagggaccaggccgtcccttcccatttaggcactgatgggctagcactggcgattgtaatttaatgatccagggtcggagtaacttgaacgtacggagtatatatctatattgtaaatgacttcttattctgtggttatgccaagacctcaaaatagatctccaaaataggcatttggtgtcttgtacggagtctccgtatcctattttgtatgttgtagatatcttttgagtgaccagtcttcaatctccagtagattacgtctaactaattcaatatgtacatagttatctaagtacttccttaaattctaagatcgtacttacatacatcgaagccctaattaactacctaactaggtagaacatacatgagcatcaacacctccccttgctggacagtatagttgttctagccaattgtctattgtgagggtggagtgcaagaggggaatgcgagtcagggtcgtggaaggggctagttaaatcgtgttaagaatagtagcgactatatactgttaaactaattatactcgagagtcactcggagcatacggatcgtacgtcctcgttgtactagagtgtcgacaatgagacagcaaaaaaacattgtcgcgaaggggttcagagatgtggatttagcacagtagatcaatcctgaccttgccttggaggtgaaccaacacaacaattccaatccgataagtactggcccctcaaaggatggttaagaggcgtgggacctttcagcagcgcccgtccagcgccagctagaccgaagtccagccgtcaccgacgagtgctgacacagattaaaacgccgtttcttcatcttggatttagttgtgtgaagaaggaaaggagggaaaagttttgccgggcgaagataaaccaacagccgacgcacggaccaggcggagagctcgaatgggaatagcgcattttcccgctttccgcgggcaacggaaaggtgccagtgctcgtccgacaagcatcagtcgtttaaaagccgtggctttcctatcggctaagtacataataccctgcttgagaattgaccttcttcagcttcatcatgtatttgtctcgctgtggtagatccgctgctcgcttgcttccccttgggagctcccgggcagccgttgtctccgctcgcgcctcgatcgtgcccagattagctcctcaatcgcggggagtagcgtcgtccactcgcgattcgcagcacaaggttggcggccagaatcgattcaatggcaagcggaacatgtagactgactatttgatagctgctcgcggcatccctagaggagtccgaccccaccgtttataacatcctacagcaggtgcgtcatcgttggatatagagctcaccaatcgaacgaccaggtgctaaaactatcacaggagaaaaaccgtcaaaagcacttcattaacctgatcccctcggagaatttcacatcgcaagctgttctcgatgcccttggcagtattatgcaaagtacgtactccgggtggccgcctctgcttgctcgacagactatcctaaccgcaatttagacaaatattccgagggataccccggtgcccgatactatggaggaaacgaatttattgatgcctccgagcggttatgccagcagcgtgccctcgaaaccttccgtctgaacccggaggaatggggagtgaacgttcaacgtatgaaccagttgacgtgatataattaaatatgcgaagactaactcattccagctttgtccggctcacccgctaatctcatggcctactccgccctactcaacacccacgaccgtctcatgggcttagaccttccccacggtggccacctgtcccacggctatcagactcctaccaagaagatctctgctatctccaaatacttcgagaccttcccctaccgcctcgatgagtcgactggcctgatcgactacgatgcattggagaaatcggccaccctataccggcccaagctgattattgcgggtacttcagcctacagccgtttgattgactactcacgcatgcgcgcgatcgccgactccgtgggcgcctacttgctatccgatatggcccatatctcgggtctcgtggctgctgacgtgctcccatctcccttcccctactcagatgtcgtgacgactactacccacaagtctctgcgtggcccgcgtggcgccatgatattctaccgcaaaggcgtgcgcagcaccgacaagaagggcaaccccatcatgtacgatctcgagaaccccatcaacgcatccgtcttcccgggccaccagggtggccctcacaatcacacgatcaccgcgttggccgtggctctcaagcaggctcagacgcccgacttcaaggcctaccagcagacagtgcttcttaatgcctctgctctagccgatcgcctaggtgattctaccagcaacggtggactcggctacaacattgtgtccggtggcaccgataaccacttggtgctgctggacctgaagaaccgcggtgtggacggtgctcgcgtcgagcgcgttctcgagttgtgcggtgtcgccagtaataagaacacagtgcccggtgacaagtccgccctcaagcccggcggtctgcgtctgggaaccccagccatgacctcccgtggcttccaacccgaggacttcacccgcgtcgccgatatcgtcgatcgcgcggtaaccatcacccagaagttggacaaggctgcccgtgagtcagctcagtcccgcggtgtcaagaaccctaataccgttaaggccttcttggagtacgtgggtgggggtgaggagatctcggagattgttgttcttcgtcaagaggtcgaggactgggttggtacctttagcttgccgtgggctgatgaccagtagacgttttcttttttttgattccctctgtatatctccttgcatgatttcgaaacgaatatgattgaagactttttatttcatttaagactagaaatgaacaagtgtaagaatcaagtttcctggtggaatatatatagtgtggactttactccgcaaagtctaattcgagacggaaaccggggaacggtgtcatcattttattttctgctgcatcggggtacgatatactgctctttatttcttcatctacagcaagacttcccacctacaatcatgaaagtcagccaggtaagaacacggaattacgttgaagacggaaatcaaaatactaacccattgtcagctctatgtctaccctattaaatccctccgaccaacaacaatcacagagggattgttcacggcacgcggctttcaatatgaccgccacttcatgctcctcaaagtcatcccaaccgaggatggctccggcaccacagccttgaaaaacatgcatatcccgcacttcccagagatggccctcttccacaccgatatcgagtatccgcagacagaaaaggacagcgggaaactaattataacataccaccctcctctgtcggactcagctcccaaaccccgcgaaatcacccgactagaaatcccactccagcccaatccgaaaaggctcagccctgtcaaggtcgtaatgcaccagagcccaacaacaggatacaacatgggcgcagactataacgactggtttagcgcctgcttcgggtaccccgtagttttagcctacattggatcgcattcgagagaggtgcttggcacactcgcgccagcacagcaagacaaaaagacggcgctgggcacaatacgcaaaagcctaaccagacccgacaggaaatgggaacggtttctcccgattttcattgtagcatccgcgatcaacatccttcttcagagcggtactctcgttcgcgacgggacaactccccaagcagctcgcagtctgacgcccacgctccttttcactgctagtgtggtggtgctagtgctacatcacttctgcactctgcatgcgcagcacgagaaccgcattaccttcgccgactgcgccccttatctggtcatttccgagacatccgtggataatgtctcagcgcggctgccggacggggaaattatggaccgcacgaagttccggcctaatatcgttgtttcgggggctgcggaggctttcgaagaggacttttggcgtgcgctgaccgtgggcgctggatcagggcgtggggcgactaggctgttgctaacggggaattgtgtacgctgtcaaagccttaatgttgattacgagactgggaagatggggactggtgagtctggtgctgtgcttaagaagttgatgaaggatcgcagggtagattctggggcgaagtttagtcccgtctttggtaggtatgctttcttggagccaaagggcaaggggattattctgagggttggggatgaggttacggttgccgagaagggaactaggaggtctattactggtgagtgtttctgcttttttccaagcaaattatgagagtgaacgctgatttactgggttctgtagattggcctggcctgacaaattgaaaatagatacatttctctttcggttgtacatcgacacggacatctcggtattgtgtagatagatatccggggaattgacgtcatggtggaggttggaattgcactatgtatacagatttcgggcctttctttatcctctgacttgtccaagtcttgatgatgaaacaatacagactctttttatattcttatgcatcaaactacatcgtaggtgagtcccgagtgagaagcataagaaatcaatttaattgggggataaacacacagccacaattacatcatacccgggcaccgccaccagttgccccaattagtcacctgactgtcttggtccatggaaaggcaactaaatgtggacttggattcggtttctaagaataacttgcaataactttgaacccccgtttcttcttcgtttgccgattctattcagtgacttgtgcgactcatcttatacattgcgttgtggtcaagctagtccagccttaccgaactattcagggactgtggctcaagcccctccaatcatcacgcatacgccgctgcctatttggagtccactttaaattgcgactctcacattgacctgtcacgcacccaaccagagctgcattcgacttgtgtgtttcacctgcgtgacgcttctaccccgcgcttctacctcacgcttctacctctttccaaaacgccaattatcccgcgatccggtgcatagttgaggaaggtatcgctgagccccgccgcgggtaagctggcgcagcagaaaaaaaaagcgatcgcaatcgttccaaaacataattgttataatccccatggatccagccaatctgcgccgcaaggacaccaccaagggtcctccgctgcggattctgtcgctaggttagtattatctctcttcccggcgtacatcagactcagctgacctgaacagatggcggtggtgttcgtggctactccatgcttattctccttcaggaactcatgtaccgcacttatgttgaatgcgaaggcaagcctccgcgtcgcgaccagattcccaaaccttgtgatcacttcgacttgattgcaggtaccggcactggcggcttgattgcgctgatgctcggtcgcctccgcctggatctcgagacttgcaaggaggtatatgtgcgtatgacccgcaaagtatttgagaccgacaaaaccatcgctggtattccctatcgctcgactttgttcaaggcctcgaagctcgaggaggcgatccgcgaatgtgtgcgggaacataccgtgttcgaggcggagggaaacgacacggggaatgggccgaatcatgattctatggcttctatggcaagcttaccatacagcccagcctctattccgcaacgctctatcagtcgggccagtttcagcaccgctgctgcttcgcatccaatgtccccgacaagccaaagaggctccgtttttcttaatgggttgcgttggggtaatccagacgcactgctctatgataatcgagaaaatcggacaaaaacgtgagttctacaatgcgaagacatgtgtcgctggtactaatatgaaatatagcgcggtcactgctatgtacaagggcaccccgcgcaagggatcggctgtccttctccgatcatacgactcccgcagagaacctccgcctgaatttgactgcactatctggcaagcgggacgcgcgacatccgcgacagggcttgctttcaaacctatccagattggtcaaaatcattttattgacgagggtcatggcacattcaaccccgcaccgcaggtacttgatgaagctgtcatgaatgagtggccaggtcgggaagttggggtctttatcagcgtggggactggaaagcgcccacctggtaccaataaccgacaacatgaatggtgggaggatttcttcggcgactcattgggcacatttgctgaagcgcggcgtcgactaatgacgaagattgagggctgcgagggaatccacaatgatatgattcgagaccgtctcgccaaacgcaatgtcagcaaagacaattatttccgcctcaacgtcgaggttggcgttggcgaatttggtatgaacgaatggaaccggctagccgatatcagcaccaatacacgacagtatctggccaggcccgaagtcaagaagatgattttagatgcaggtgtgagatttgctaagatcgatcggatgaaccgccgtctggcaagccatgccgcagctggcggggatcgcgacgacttatcttttgatcttgagactgaagagctttctttttctcctcccattcaatcacatgttccgccccctgcgcacttcgctgtcgaactacctgcggagctacctgcggagtttcttaaccgcgcacatcaccctacaccttcacaagcgccgccacccatcccaaccgtagtgactacatcaccaacggatagcacgctcccggctcacccaacacctcaggataatatatctatttcctcgcctcggcaatctggcagtgattatcgtcgaagccacgagctttcaagccgaccaagctcgcaacaacagagcttgccctcccacagtgatgattattctacaaccttcaatggcatggcaccaccggtgccgccgaagacgcctatcccatacccagctcaagaagatggcggcggcgtgtctatgcccgcgccgctattctcccaagcacctttctctacctctacctcgaatatcaaagtccgacctccctacccagttgatgagccaccaccaacggtgaaccggcaacgcaagcccagctaccacgtacggtgatcccttctcacctgctttcatctcgataccttttttttcaattctttacatgtgcattacgttgtttttgtgtctttcctgctgaatacccctctgttgagacggttgattaaggctgagagggcgtctgggggcatgtaattctatttatggggtttttattttagttgacccactgcgaaagatggccagtgctggcctcgctcgggcataatgaatgatgacatttatgaagattcaaatgtgggaattgatagtctgtatacatacctgtgaggggaaaaagaaccagcatggcactctcatctacatagacatccactacgatataggtacttgattctccgtaaagacaggtgacttgtcccttaataatgtatatgctagcgtatattgttcagaggactccataaactactgcaagcaatataagccgacgtccaaaggtaccggtacctgccgatcgcagcacaagcctcgtcgctagaagtaccggtacctcctttccccacacagccccccagccatctcgatccctttccctctcctcttccccttccccttttctttattattttctttaatgtaatttttttctccattcttctctgattctctgattctttgtctgaaatagattccactttcttgataccctcaaaatccgaactttgtcaagtgctagagtcatagcgccaacggctgaaattcccccttgcggaatcccacctttttccttccctcgtggacattttccagaagcattcccagatcgccgttctaaatcgcagttattcccctattacaaaggtcgttgcgatcccgcgactcggaatcgttgttgacgtccctcgttgatagtcgccccggcgatacgcccagtctttatcgatatcgcggcagcaccactaagtgtttcaaatagtcgctgggtctcgtcttcggacgactctctgtccccgtctcttcccactgctggtcagtgtggttttaatctccagtctccacaatcatggatcccaattccgccttgtcacatgcaaacaacctgctcgcgcgcgcagaatcttcaggccgcccaccagtgtacaaggccgtcggtgtatcgctagctgtcgcatcgggcgtcttcatcggtatctcgttcgtggtaaagaaaatcgggctgttgaaggcgaacgtgaagtacaatgaggaggccggcgagggatatggatatctgaagaacttctggtggtggactggcatgacgctgatgattgttggagagatctgcaattttgtggcgtatgcgttcgtcgatgcgattttggttacgccgcttggtgcgctctcggttgtgattacgacgattctgtcggcgattttcctcaaggaacggcttagtttcgtggggaaggttggctgtttctgttgcatcattggatccgtgacgattgctatgaatgcgcctgagcagtcctccgtcaaggatattcagggcatgcagcattttgttattcagcctgggtttctggtctatgctggcttgataattattggggctgcttttacggctctttgggttggtccacgctatggaaagtcgagcatgtttgtttatatcggtatttgcagcatggttggtgggttgagtgttgtggctacccagggcttggggtctgctattcttgctcagattaatggcgaggagcagttcaagcattggttcctctatgtcttatttgtgtttgttattgggacactgctgactgagattatttatctcaatgtacgtcttcactcttctcgtgtctcatggctatgtactaacccagctatacagaaagcgctgaatcttttcaatgccgctctggtcactccgacttactatgtgctattcactagcgctaccattattacttccgccattttgttccagggtttcaagggcacgggaatccagattgcaactgtgatcattgggttcttacaaatttgtgccggtgtggtattgctgcagctatccaagtccgctaaggacgttcctgatgctgctattttcaagggcgatctagatcagattcgggaggttgccgaggtagaagagcccgagtttgagcccaaagcggactccattcgcggtgcggcctctatcattcgtcgcatttcaactgctcgccgcactatggaatcggatgaagcccgccgtttctttcatgataagcatgaagataccctgacagtgccaggcgagaatgagataattgaatgggatggcctacgccggcgcaagactgttattggcgagggaccgactatgtcacgaccaatcactccgcgaacaccctcggtcaaacaacaacatcctccgtggggcatgtcccgattgcccgctgcggagcatgaggacgaccaccgacctaacaccaagcaaagcggtcattcttttatggataacattcgatctcgggcaactagcgtgcttcatcattcccaatggaagcctgtaaatacagaagacgagaaaggttctaacgccaacacccaatcgatgggaatgacagacatggcacaccaaagtggcaatgttgacaccgaataccatggtgccggtatggctggaggtgtggaggctgtgttcaacgcaaaccgtccacgtagcgatacgccgcggtctatatcatgggcagacgaaaagcccgaatcactagcaccggaacctcttgccaccactacccgccgccaattttctttcaacaacatgatgggccgtatgaagaccgacagcgaatcttccgtcaaacccacaccaggttcgcccccccgtggcatcctacgccgaacgcacctggcacccgatctgcgcaaggacgcaactgaggaagaatcactcggcctcgtccacggcgactcacgccgttctcaaccagaggaagagcccctgaacgaaaagctagaccgttggtcgagcgccgagtcagaacttgacgaaccccagcccatattcacaggtcggtcacacggcaactccgtgtctagcaacatgtccaccgccgcattccccgcctatgaggataaccaccaccactactccgagtccaacaacccctactatctcccgcacaaccgacaaactacctcatccccagaacccctctcccatgaagaagagggatggaaacaccattcatcgagggggagcagcagtaggactcgcacacggacaacctcttctgttcatgtgcattctcacgccccaccccccgcccaatcctccttctctacccaccgccatccaaaccccttgccgccactccctgatatcacacccaccaccaccctcgatctcaggcccatcgcaactaattcgtcggcattgagatcagtctcttcggaatcagatatggtaacaaccctctctagcgaaacgggagacctcaacgatcacccccttggctacctcgcgcgccaacagagcggctggcgtcggcatatgtctgaaaacagcagccatgatggcgagacgtatgccacgcgcggaggtagaggaagttcgttcaggtgaatgagaaacttgcaatctttctggcttatatagccatcctggattccagtttatggcgcacatatcctgttttctttccctatagtattttgcatggctatggcgtttattgagagattttgttgatatgtcttttcttttctgttttttaactgatttttgtcctgtggtcgaacctggttttgtcaaaccagtctgtacatgtacggtgattgtgattgtgatcttgtatataatggatgttatgataatggtgcatgatattaatgaaatgagaacctcaagtgtcaagccgagagtagagtactgcataagtcgtatcagcaacggtggcacattagtcaattgaacgagagaaatttcaaagcagacgtttcatattcatgacgatcagatcagattcgatgtgatcatagatcattgggtatcctaagtgcacgtggttggaatgctcataatcccaagccggaaaattgacggaaaatcatggctctatccaaaacgccatatgctatgcaaaaaagaagaaagtcgctaaatgccaaccataaccatgtaaaagaagatcacttcttcggctcctgcgcaccaaacatcccagcaacactccgctgccccttggcggcaacatgcatactagggaaccgggactcggcaagacgacgcccagctttgatactctcgagagccctagtgataaaaggttcaacatcagaaagggtcacttgccggtcttcaacagcatcaggatagtacataccagtccacactgacaaccttcacgcctttccaccccccacgggcaatttcctgctggagcttgcccgccgcaaggcctccccctgcaccagatacatccattccactcccagccccagtattgggctgtccgacaagaacatgcgtcaccgtcttccgggccatgtaaatagaagtcttagccccgttcgacgctagtaaatgtttgagtttgtactccgaaattcgaggaagtgtggagccattgatgaataccgtaacaccagcgaagatacgcgaagtcgactttaaatcaagactggcgctagagtgggactcgggttgggggttgccatctatttgagattctctctttttcatttcccttgcatctcgagctggagtcaacccccggttccctccaacagtcctaagtctcttcgtctccacatcggtatgctgctcgggctcatccacaaccttcctcttgctaacacccataaacgaccggatgtcccgaacaccgagttcgttccgctttgccacatccccagctaccatagcccactcaccggaagcagggactttgggcggcgagtgcggcgcgcattgcccatcgaacaccccgggtacaagcgttgactctcgtgtttctgtattccgaaggcccgatcccgatccccttccccgtcctggaagacaatccccactattatactgcctggtcaatttcgccgaacgcgcatctcgccatgatgttgaaccgaggaaaccgccgccgtcggctgcatgctggtgacccgttgaggctgactgccaggagtcgaaatagaggtggttttggggtcctgggggttgtggttttgcggctcgttctgatcggtcgctggtcatagttggatcttgcaattttgcgggtttgtggcgagggtctctattcgaattttgagggtgacgttggccgggatgaggtgttctgggatgtcgttatgcttgagttgaaatttggcgagaagtcgccgtggcgtcaaacggaaagaaccatggttcgcatgttttgattttgctgttttgggatagatagggtagatttagtcacgtggtgtgaggtatgcgagtacaatgagccatatacaatttatagactctatttgacggtttccttggagatacacactggcactaagctgaagcttgagaacaagtctcaaggatgaagtaagataaccgaagctgccatgaagaaagcctaagtatctaatagctatgaatgcccccgatgatctatagcgtcaagtcgtaacggtcaagttcaatagctcaataagcgaagcaaggcccagcagactacaatttacaattacatctacaagctgtaaggcgagagaagtcggaaaaaacaatccatttagaccggacaaaaccaacgttgtatgtcgctaaaggcatgcagacccagagttcataaccgttcattaccatgataatcatctctctagtagagtggcagtggcagaagcagaagcaacagcagcgcagagagtagagaggggagtaaaaccaatgccaatgccatgccacaaagaatacccttttcaaaccccagaacacgcatcaatgataaaaagaaaagaaaacaagagaaaaacaactcgttaatgaagatggctcgtcgtggtcaagtcatcacacaaagaaaattcgttcataagagattcgtcacatcgtagtcatcgaggtttgcgatcactatccaagtcttcaacaagtggcaagtcttttaaccacggaagtatcaagaaatgcgtcgctaatgttgtaccgtgaacagatcttgcgcctaattcttcccctctcccccacacaagttagatattctcaaaaaaaagccaaggtttcttcaacctaaaacataacgcaaagagacaaatgagcttcgtttcgtttcgacaccgccgggtctaccgatatccacgtattcgtagtgagacacagacaagaccgcggcgcgccatgcgggttgtgcatgcgtagtctatcgtgaaaaacaaactccgaccgagaaattaaccatcagtaaaaaaaaaaaaaaagaataatccagcaagagccaaacaaaacccgaagagaaccggaacaaaaaaccacaagctcgaagctagctagaagctacaattgaattgcacgccctcagcggtgacgagccatgaccccactaggcttcatgggctgaagaataggcgggccaccgaccggacctccgagggtagaatcggtgatggtcttgcggcgctttgaggtctcatactcggcagtactctcggggcggatatcgtcgtcctcgcgcatgcgcttgctgcccgcactcagcgaaccattgccagatgcgtagaccggagccgtggtcgaggccatggagtaggggtccgacgcaccggtggctggggtaccgcgagtatcgctgacagcgttgtacagggtagtggcggcgggacgaggaggggtgttgtagcccgaagcccagtgaggaggggggccggctcccgtgcgcggagtcatgcggccggagccgttctgctggctcggggagctggtcatctccggggtgagctgggagtgctcaccggtcagggagctgacggaggggtttgtggtgtaggtgtaggagctgcggttggagttgtagccggcgttgggatcttgcatgtactcctggtcatgctcggcgacagtctcaccgggtccattgctctggctgtagcggtttgtgtcgcgctcagaggtttcgggctctgaggcgccgggccgtgggtttggtggcgccatctcgcttttcatgtacccgccgggcaggggttggccgtagttggacatccctgattgagtcaatggggtgtgcggcgcgtattgggcatgagtttgtggtgccgcggagtagtagggcttggagctgtcgtagccttggctttggtaagctggcaagccttgcatgttgttgcccggtggggtggttgcgggggtggttggcattgagcgctggttgctcagcgcggtgtcgatggacaggggttgtgtatgtggcacttgtccgccccattcgtatgaaccttgatggctgacgcccatcagactggatgcgctagctggcggtgtggggaatgtgttggcacgttcgagatttggtctggagccgggctggccgtttattggaccttgggacatatgagaagacatgggggtctgcagggaggggtggtgatggtgaatcggggtttgctgagatccagatggcgtacgctggggacccggaggtggaccttccagacgtcgctgctgggactcttgcactaccatatttgtccgagtctggttagccgggtggtatagaagaccaccaatattatgcacgaagagtgggtataggagatcagtgatcttctccttgttggcaaattctagagcacgctcaaatgggatcctgaagaataaaagtcagccgatgttgcgcatgctctccggggtcaaaatacataccagacacctttcaaatgcatcggtccgattttcacaacatgacggagcttctcgcttttgaggattccatcacgtcgaccacgggtcatgccagctacatttagcagctttgtgccattgaccatgtggttatctgcgggagaaacgttagcaaacatatcctcggttgaccttccagcagaatcaacttaccctcgcgtcgagccacgcacactccctttgcttcgacctggtagcagaggcttccctcatcttcccataatgttgctgtcactcgcggcttcgctcccggaggagcaacttgcccagtaccatcaaagacaaacccttgtagcggagcaccagtagtgtttgcatagccactcggaggtgccacggggtgattgctcacttggtaacgatcagaataatcatccatcccactctggctttggagcttaccaggtaagggcagcaactggctctgcatctggccacccatcgaggttggcgggtgtcccgcgggtgaagaaacgcccggggcgtacccatattgggggtaagcagccggggcgtaagaagacgcgggctgcatcaccgggggttgcccgtggtactgatagtgggacatagcccctgcggttgcgccttgaggagcgtaggactgagcagaggacatgtgcgagtggacatccatgtacgactgggtctggttcatgctgccgagggaagttgggctgggatagtacccttcgttgaccgaatgtgggagactgtattcggttgcggatgaatctaatgaaagccggccctggttcccagacaggtccgcagaggacgggctcctgggttcgttggtaggcacagaggcaccagacagactcgtgcgagcgctagaggtggtggaattggtcgcggacgaatcgtgataggcggtccgagagaggccctgggtggctgttggcaggctgagagcggggagtttgtcgccgggcaataacggtcgttccgccgcgtggtggttgtaccaggggatgtcagcaggaccgcgggtatggacctgcgagatcgatggcagctccagcttttcggttgcacggataaacggtttagaaaaatggagggatgaagcgagcagcggacgtcgtaaatgtcgtccggcgtgctatcaatataggccgcagaatcgttggaagaccacagagcttgcgaacgtcgcacgaaggggaaaataaaaatagtaaataataaagagaaagagttgcaaacgcaatattcaacgggctttcaggatcaaacgtcccaaaaatagagaatttttatagcaagtgatgcaagatgcaggcaatgcacgtccaatattcgtagtgaagcttcgtagtaagtcgtaaaccttttgtcaagactcgggaagcctagacagaagcgcaataaggactttttcttgaaaagcagaattcagcgagaagcacaatggtcatcagaatcattaacaatcatcaatcgaacacatcaaagttgggaagcttcagtggaactagacagaaaggcgtaagtttggaggtcgtttcaaggtcatgcagggaatcatgtcatagaagaagaaactctcaaattggagcgcattggatgataaaataaggccaaagccggataaaggtagggggagggagagttcaaagtcttagacagtcgagggatgggggggttgagaagagaagaagtgcgttcgacgtacagaaaggtggaggctggggtggtgcagcaaacgcatccctatgcaggctggatagatggcgtttgaggaaaaagaaaaaaaagtaaaaacaaaacaggccaaacagatatatagcaagtaaaaatagaaatcaagggcaaaagggcgggcaatgggggaaaatgcaagcaggaaatcgtacagtgaaacttagcccagcggttaagagaggggaaaagaggtgaagcaaaatgacgctgagccgcagcgggaaagtcgatcagtggaggataagaagaagctgactaaggcaggcccaagagaagaaagagaagaatgttgtctgcagaaatcccggcttgccccgtcttttgagggagagacgaagaagagaaaaacggaaagcgaggagagagagaggccatcgaatcaatcacagtggacccggtagagagagagagagagaggactaccagaaccgtgcgtttagatcatcctctagactcgatatctgctgtttttctttttcttttctttcttttctttcttttcgcttttctctttttctctttttttcgtgattatccgattttcctttttggaattattccattattttcgacgccaccaagtaaggaccgtgatcagcaagcgttaagcggcgaggtcaatcattcccattctgaacggaccagtattaacgagcatttcccgattcggaccagacctagactgcagggacaagtccaagagaaatcctcccagaggatcctggtctgtgtgacaggcagataaatcaacacgatcggccgggataggcccgctggatctgggagttgattcccttagtggagtcaccgatcagattcaattaatttattgcttttcttgagagggttactcgagactctactattgctggggcggactgcaggatagaacaatagacggacgagctaaccatcccctctacacaccacccaaaaagccctcaaacggttcctatcatccaataaataacacctcagaaataccacctgagacggttcgtctccacgcgcgcgggtcccacccagtgaaccatgggcggtcgaccggggagtaggaacggggggaatacatcccacggtttaggctgaggttaatggctgaaaccacggttgagataccaccgtccacttcatcctacgacatctggtagtcgcacatcggtactatatcgtgcataccgatgatccaaattgaaatctcgtcccgactgctctttcatcgtgcaagacatctgtcagccgctgcggagaggggaaagtaaaaaaaaagaaagaaagacccggtaatgcgcggcggctgcaccgtcgattgcggattgcactctcccgcttctggagccagcgcttgcaccatttcccctctatttggggtacagatgatacaggctaatacctgcaaggtccatcttaaagaaacggttaaattccgtcccacaaaacccttcaccggacatcgcccgggcctcccctctcggatatgtcactgttagaggtggtcgtcgatcgccccgggtcaagtccggtcaaaggccatgtgtggttgtagccgatttggcccactacaatcctattgcaatccctaagccaagcacaatataataccaaggccttggttgtgttcttctttttatggttcgggacgatctaggcgttaagacgggccgtgagtaacagtggagagacaaagaggaaagaagcacgtcacaccccccgggatgcagaggggagaatcagtggctcagaaggaaccacgaaacacgggtggcttgaagtcaatcaagggtctgttctctcttcccaatccctgccaagtaccacgaagaccagtcagaggctaggcgtttaccgaaactgcaggcgatccccggccggttgaagagaaatgggaaatgggaaattagaaatagaggtcaaaggcaaatagaaaatagaaaatagataatagataatagaacaaaaaagaatcggattgagtccagaatctgtccaaccacccaatttcagcccgaattgaaataggcccttcacacgtagcatcacaatgtcaactgagagacctcgtgatgatgtatccgactctttcttttcgcctccaaggttatcgggggatcgtattgaggctggaatgattcatcagcctatctatgtacacatgaatgattatgttcctgatagtatagccggataatagttctaggcaaaataatagcaaataacatatttgttttgatcgaatttatttttccttacatttttcccccaacaaaaaccgaaaagcctagagccagatcccagtaaggggggaagatcagagagacgctgaacatcaagccaactcgaccccagttcaccgctaatttcgtccagagaggccaaagtccccttgcgttttggcctttttattttcatttattacttggatggtacttattctccactaataggaactaatagactaaactattcacggacttgatttctaacctgatagtctcggctctgggttgacagatgtcaattcccacgctttcccaaaaaaaaaaaataagaaaaaaataaataaaaaaatgacagctagggattcgcccggttgctattttctcagtcctaccctaatatgcattgaccactgtacatggacctagattcaatggttaatttctgagatttcggggagatcatgatcggaatatgatttccaaatatcaaattattttgtactttgcattctctagcgggttctgcaggtggcgccgatgacattgtcccgccacacagacccttgagaggtcggtgaacatggggccgggaaaatacgggcctaactctagaccaggttacggagtagatatacttgcttggatatatttcaaggccaactagtctcatgctagaacttccaaacgggtaggaataccgattttcttgcagacgttatgacatacacggaagcaggtactacccaccctcgcacactaggcccagagagctccgggaaatttacagaaagagaaagtgagaggggccagtactgacagatccctgcactgcagctcgctatcgacggcccgatacccgctgcacatacagcatacagtagtttaggggggcagcatgggggagggatccgcctgaatcgacacatatctttactggaaaaggaaatagccttccgtgccggaggatttgggggctgaatgctcaatggtattgaaaggaggctagagtggaccactgattcatgactttgcttctttgcttagcccttgtgttattattctgtcagtctctccccgacaggaatggaaaaaatggagagccgaattaatcaaaatcagctcaaatgagatccactatacggagtatacggagtacccacagccattggaacggcaactccgcaattcggctgtgatgcatcgtatgggaccgttgagccgaaaatgtaaggagatgatcagttcttatgataggtacacttagtagtatttgagatataatgtcaatcctttacggagtaccctagagagtagacagcaaatactcgactatcaaatatattccatgtgtccattcttttccactgatcgtccctccggggttttccgactatcaacactggtggatctctagggttagaggtcacatacggagactagagaatccttccaacattattagcatttatccataaactctcccatagctagatcctccacttcactgtttacgccgtcaatctcgcgtcgatcgacgggttcgtccgtaccttgcagcgagttaccctgcagactcttgtccgtgcagatttcaggcttttttcgtgaaaacggaccacagacttcgaatttaaatattcttttttttctacaatgtgcactattatcatgtttatatacggggctttttggttcctcttctgcccttccggtctataatatttcaggggctgccatgttttcccatgctatactccgtacctcacacatcaaaagaggcagaatatgcccgaagccgtctgggcagacgttcatgcccgataaggccatcagactgatgatcgcggacacacacaatgggtacaaggcctttgagaggcatgtgtggtacagcataattacggagtacgattgtatagcgggagactcggacacgaggaagatttgaccgagagccgatgacttacagggatgttccctgcagactattgatgtgttgtacaggacggggcaaatgaaaaggcgaatcgaccgagatagcctccgtatactccgtagccccgtagccccgtctgctataggtccacggtaaccagaggtacttgcccaagtaggtataggcgtggacatgatagtgaggtacatgtaccctgaaacaatatttgaattgtgactctgcttttcatgtgactggagtaatttcctggagccagaacgccacccacttccctcgcgcgaataacaatgcaccacgaagccaggatctggcgtgatggaactaggctggggccgtgcaaccttggatttaacctcgcattgcattgtcccgtggagccaagagatcgactgcacgttcatcttgcctttgcactctagcgcttcttgtgtcgcaagagaggggggaaggaggagagataggtctaacaagaatcgactagaaaaccgccgtggattagggattttgtacgtcggaccatttagtgatcataaccccctgagtggaatcgtccaatccagaagaaaatccaaaggtcttgaataattcaaccgccgtaaccgttgacaagcgccggtattttcgagtcatttattcgcttttttttttctcccgtgaccatagtggtagtccagaacaatatcacctggaatccctcatatctccgaaatagccaggatggctcgggccaaatgtgtaacgagactaaaaccccatccaagccagcggcgccaatgattggcttcacgtaccagcagcccgccgatcgatgacccgacccaacaatgactggctacggcaataaccacgtaggcagggctagatcgtgtggattcaccgccagttgccccccttgcgtgcagacgtggcacagagcattatctcatagtccgtacggagtagctccatctggtatgcagtgacccgctgctgtggaggcctaatgttggatgtatgtcgaccgttgtctgctttgtgtatggcttattatcccctatagagtacgaagtacgccgtgtaggtgagacaaatatcaaaaattcaagatgtgaatttttttccaaacgggaaatatcctcaacaacgccgatatcgggctattttgggccgatcggcgcaacgtcagagggcagataaggaaacattaaaacaagtgaacttcgatgtacgacatagtcaaaatatgccactcttgtgagatatgaacttgtttactatgttgtacaaaatgtacaacagcacttagattcacctgttcagaaagggagtcttaccagcttctgcactaccacatctcagccctttgtacatgtcaaaggagacataagcataattatagatcgtgaaccattctacacagtccatgtgatactagcactatattcaaaataagcaattcttccctaggttgctgtgtcatccctgataatgacaatgattaggcaataatcacgctaagcctagaacagggagaccccggactagaacaccaggcctaatcccaatagacagataggcaagagccagagcaaaaatccaaataagcccaaaagaggaatgaaaagaccgctcaccgtctctttgctgtctcagctcacattttatagtatgtactgtgcatctgacaccaaaacacgcgccgtccacgcttctatctccccggggaggcgtcgctagtcgatcgaagaatgcaaataccatgcagcgtgcagcccaagctggaagtatcatgtacgatgaagcagagccagagtgacaagctagctgccaagtgccagcgcaggcggctaaaagcaagtgcaagtgtaagccacccacggactgggttgctgtgcatgaaatgatgtacatagttaatcgagcctagcctaactactataaatgggtgggtgtgaatcatgtccagatcggaggttggcgcgcgtgggggtttccacattctcgaagcatgtctgccattgatattgtgcatggagcgcatgagggtggtgtgggtggatgttgcatatcgtgtcttgggtgtgtctgagatttgttgaatttgtttcgtattttgcttttttttttctttttggaggaaagggaaatttgctctggttggtacgggttgaggaatatctgggggggggtggggatgaattgggcatggggttggcagttcgcttgcaggaaacttctaaggttcttacctgggtgttcagacctcacgacttcgtagaggtacgtattcaccgctggttgaggacctgcatcgactgcaagtctctcgtgtctgtcaagggatagttcgtgtttgtgggagctggtattggcggtgggaggttggtatatcccttgattggaaattggattgttgctgcttgtattcgtagaccgattgtttcccgtgggaaaaatgcgggaataagtttgaaagatctggtctcgaccttttgctgggagggttggtagaagtcttgttctatgcttatgcagcaccgatctcgatctgataggggttgttgcgatgataatgcaatcgcttacgcacagcggatcaatgctgatagtgtcggtgcgtcgactcgaggggacgggcatttctgcagtgttctgtgctatgtactccgtagacctgaacgcgcttctagaaggcgtggttggtgcagtatgctgtcttccgttgttcatgtagggatgctacggttcctgctgatagatcgccgggatcatatctgtattgcctcaatacgatatataagtcaagctgtgcgcggttgagccttaaacttcgatcaaaaggaatgatcagatatcggtattgggtcccgtagctctttcttttttttttccttgctctagaagacatagaagatcttcaacataacccatagaagacatcataaaagacaatatagaagatgacttgaacgtgtcaacaacaatggacactacggagtagacgtggcctatatttgcccggaagacgccattcattagccgatggcaatccgtaattttattcgatatgaaatgtagaagaaaagccgaatcatacattataccttatagcgtcgggtcaatggatgtttagacatgattcgagggatatgtcttgagatgtgtgtccccaatatatatcccctcctcaaggtagaactacgagtggcatacattaaaatggaaaaaatctccaacaaaagacatatacattcactacagaagaaaggagcattatttgaacgaaaaaagagtgtttgtccattgaagtaactctaaagctaacaatatcccgacaaagttctatacccgacccaaccatattcatcatgttttttttacatgcatatctcatgaaacgcggatagcataatcacacatcagggctggtaaattcatcgcttaccagcctgagaaaaaatctgttgccaaatgtcgatccattgctgatgcttatatgacaacggacggtgggggttgcggaaagtgatcgaaagaatctcgcgcaggcggctattcaggatcctcaaagctagcatagacttccaatctcgcacagcgaatcggatacggtttgcgtcaatggagacgacaccagaatacatctgtttggcggtggttagcttattgcctaagaaatggggcaaggaaacgcgaagaaggattgctgtcgtcgtaccttgaactcggcatcaccacacagtaaagctatagcaaaatcgtccactgcactggtatcgtgcgcgttgaggttgcgagcacgtgccatgatgctatagtatgacagccatttgacagacgaatccgccctcttgttgacagaaacagcgggcagtgtgactgtctggttgttgccaacgttgcgccagcccttgccttcgcgcgtcagaagcttagggtagaaactccaggcgatgaccgaattgatcacagtatcattgttgctgttgatgtcgaaatcttcagggatgatgaagaattggcgatttcggctgttggaacgtgcactttgggtagggttggttagcaattgttaggttgaaatgtgacgtttggacaaaagaatctcttaccggttgagggccgctttctgtgatgcatctagggtcagaagacctgcatcggcaattgacactaccaattgcatcttgatatcctctatggccagtaatgtctgcgcgctgaggaagttctttcggcagaaagaatattcgttggaccccggtgtgcttcttgtgcgcctccaactacaataggcgttgtatacggtcaagagatccgagtcacctagtatttgttagttctcaactgcgggagagcgatatattgggacagacctcttcggaaagatgcccgagcaccatcacgttgtgagttagatccgattgtgttgacgaatggcgacttggaagagaggatagcagcaatgctgacagtcgcatccaagcaccggaaaaaggctccatgaatgatcattttgccgaggaagacatccagcggcaacttggcgagttgtgttccgagagaggttaaactctcgttgctcgtcagggccttgacttccttcagtgaatcaatggcgcggcgaatgtttttagacgacggcgggtcaagagcttcgaggagtgtctgttccacttctcccagtttgcagatcttgacacgaagcactaaatcctgcaaagaaaggcgcagcaattcgggggtttgctgttcagaaagcaacttttcgtggcggtgtttagtaaacaggtggaagcagataccgttctggacacgtccagcacggccgcgacgctgcttagcgttcgcacgcgagatgaatgactcaacaaggcgggataattgacgtctctcatcgaagcgcatgatcttctcctttcctgcgtcgaccacagccgtaatatctgggatggtgatacctgtttccgcaatgttcgtcgcaataacaatttttcttgtgccttccgggggtacgttgaaggccttttcttggtcttcactggcaatcgaagagtgaagtgtatggacgatccaacccctctggaacatgggctcagacaggatctcatcgttcaggcgacggatttctgccagtccaggcatgaagatcaagatcgccttgctgtagtgagtcatctctggggccgtagcaatcttcagaagtaacctcttgattaggtcatagtctagtctgtattcatcgatgttgataacagtctccttggtttgtctagaatacccatcaagactggcttggagacctcctgtggtgtcggcatctgtgggtgggtcatccatatcatcgtcgaggactgtgtgctgggcatcctccgacaaacggtagttggtcatctcgaccgcatcctccaggtacttcatctccacggggaatgttcgccctggaatgttcagaactggcaccccaccgagatagttcgaaaaacgttgcgcatcaagggtggctgacatgaggatgagttttaggtcaggccgcttctgcatgagtcgtcggagcacgatcagaaggaagtcactgtcgatagtgcgctcgtgaacttcgtcaagaaccacatgagtgatgtcttggaagtcatcgggccgttcgagcattcgtacaaccacgcccgtggttctataaaccattagttgagcgaccacaaatgaaaaaacgggagaaaagtgagaacttacgcataaatcaatggcgtggattgagtaaacttgctttccaaccgcaccgcaaatccaatgagagatctattcgtgcccacgtcgttcttgctctctccaagctcctcgctgacacgtcgagcaagcgagattgcagagatacggcggggctcagtcacatagatcttgcatggtcggccttggatcatctcatgctcgagaatgaatgacggaatctgtgtactctttccactacctgtttcactgcaaatgatcatagctcggtgatcgtcgagcgtactcaggatctcatctttaaaaccccagattgggaggttcattctaccttgcatcatgcggtgataggacggtgttgacgatttagcaatccatgcttctttcaagcggtcatcgatacccgcgtaattgtcacgcgtaggtcccttcatcggggtgcccggcttgctaccaacaccgtttctcttccggaagttgtcagatagaacgacatcatcttcgaaggtgccttggttctcttgaatcaaacgcttcaactctttgacggtggttttgtcaacttcatcttgttggatcttctgcagtgttgcaaactcagtccagagttctctccaaactgccggcaaccgcaagtaggccttgccctccttggaattttgggggaacaagatgaacaaagccagagtcgacacgtacccctccgcctgctgcgcatttggtgttgcaagggcatccattgacacaaaagtagccaaggcattcgacttatgtgtaatcgattccactgctagcgggaatggagcttcctggggcttcgaccatcgcacctcgagagcttttctgttcgaatgacttgaagaggagaaatcttggtagacaatcacgcatgttgaatctctcgatttgcaagtctcttccaagactcgccgtgggctcaggcctgtcgatttcccaaagtcgcggagtgtgattgaggtttgggtctgtggagcaggaatacctaaaatcgagcctgaatcctcagcttcgccttggaacaaatctccaagggcatcctccattccgtcaatcgcaaggagggccggctctagctcttcgttaatctcgggctttggctgatcttctgcatcggtcgaagacttttttttcaccgggcggcgagcaaatgaagcatccttcctgagctcgtcaagcttttgctcccatatgtactctgcttctcggcgttcgaaaagcacatcccgttcgatcttggcaatcttccgctgcactttagacgtttcagggtcatctgataaattgctagcaccgacgcgacccttctttccctttccggagcgatcgaaaagatctgggtccaagctgtaaagtcgagtctgcagctccaaccattcgggaaccatgatatctgggtcgacggagctatccgagtcgtacgaaataggaggagcaacctttgctgccttccagtcagcctttttgtttcctggcttgcttcgattttgggatgaaacaggagtcgaagtccctgaagctttcgattctgttaagagttagcataatgttccaatgaaaaccttgaacctgggggtattacctgtcatccatgaggtgacactatccgtgtctttcagttgacgagtatttatctgtgtgtaagacggcaattcatttttatcactgtgcgtagccaaccattcaattgcttcatcaaggttccacacaacatcccgaccggcactgtttgagttgccagcaaagtattgcaaaacatgcttcagtgcgtcctcgacacggttttctggaaagttgagtttgagcagtgtttccctcaaggtccaaagcttgttgtataaatcgtcctcagagccagcctgttttggacttgtgatccgtccactagctatgagatagtcatgctcttcggtaccggctagttcgagaatactgtcttgaatatctgtcggtaaccactctagaaggctcaatgatactgattgctgtcggaaaacgcggcgttcgttttctagcttagtggcctggcgcgctgcgtcatttttacacttcgcagcatatttatcaaccaaaatctgaagctctgcttcttcaagatgcttttccagctcctccggggtgtagtcttgtaacgaggaggttttttgtggtgcggcgacatctgcaatccgtatggcattgcgttcaggttgcagctcgatttctggagtggcttttgattcttcggtggctggagaaggtgtggatgttgcctctggcttaggctttgagggcatggagaccgttgcgaagcctcgagccgggttggaggcgggcttcttctttttcttgctgctcggcggcattatgtctgaattatcagcgggcctagcggagatgtcttcgaagcacgctgaaagtcagcggccaaagaccaatgaatttggcctgtgtaatattgtggactaaggtgcacaatattcccaaaaaagggcgttgaaatgtgtaaagaacgaagagtcggccatgattgtttaatggcgggatgtgatccagctccccacacaaaactctttatgacagcattcctagcccacttcaccaacttcaacactctctgaaccacccccttctctctcgattcccccgtattgaccgccgatcatggatggaattccatgggatcaggtcaaggccggggatctggatgccttgcaggtcgttctcctctcgagttcgacctcgcgcaggctccgggccctacaagaactccgcgacaagaatggtagcgtgttaatccaagcctcatgacaagcagattgactaactattcattttatagggtctgaaatatcaccagaaatcaatcacgatatactagacttgctcttccgtacctatcctctctatgtcgatcgatcctcccgacaggctgtccaacaatgcctccgctctctcctccgcggccccaatgcgaccgaagagttaaaattccttgcgcaaaaattgcaaatcgaggcatctagaccaggtttggcttcctcatttgcatttgttctgttggaatggtgctgtattctgttgcagcaggccagcgaggaccagaacacaccgttggccactgtgctagacctgattgcggttgatgccaaggccctggagaattgtctttctcacaatcctaagcctgcgttaaagcagtcagctcttcgagtgacacgacgtgctttgcgcgctgtattttcgtctaaggcatggggtgctgatgcagtgcggcagtctgtcagccgactgaccacggactctaccgcagcgtacagaaatgtgcctcttctcggtgtcgtatgtggagtctgtgcgcgactagcagacaagaagccaattcttgaagagtcgaaaaaagagattttagctttctacatcaaggaagtcgtgagctcaaaatctgttgtgcccgcacatgtcgccaatggcatgtctgacttctttacttccttcgtaacatatgaagatgttgccactgaattggtacctcccatggaaaagtccatactacgagcaccggaggtggttctcaacggcgtgattcctcctctctgtgtcgctctgccagaagatattgatatctcggaattggtgcaaacacgcctttccaagcatcttttaactagcatgaagtcaaataacccatcaatccgccaaggggcatctgactcttttgcatccttgctctctcgatgcagaaccggtcccttggtcttaaagatcaccagtgaaatcattggtcctctgaaaacgcagaagattactactcctgagcaccgcatggcttacgcccaggcaattggggctatttcgccttcggtggatgtctcaaaagaggttgttcaaggattctgccctgttttttcacgggagtcgaacgaagctgccctggaagaggagatcaattcctttagcaaacaccttacttaccttgttcaatctaagctcaaggttagcgatgatgttatcagcactatcgtcaagggtgtatcagataagcgaattcctttccgaaagatctggcaagcaagtgtgggagaagtcctatggaagtctgatctcgaggttttgaagacccctgaaattgaaccactcgtcaccaagttcctcgctaaaatgaaggatttgtttggtgaggtcgcctccaacccgcttccctcggcccaaagcggtgctttgtcttccgcttatctctttctggctctgttccaccgattgtccgatattcaagagtctgccagctccgcttgggaggaaaacgtaactcaatcgatgaaattgagccccaagccttctttcctcctcaacccgaaggcatactcaaagttgagttccaaggaagaggtccagtggcttgtcagggctctggctgctgtggcctccgggtctaagtttgctagctctgaagatgcgtccaaaacagcttgggctcagacctttatctacgcgatcaccgggcctgctattccctcaaatattcgcgagaactccgcggaaacattatcccgggtctatcagacggatgtggcctcttttgggcgcaccgtcctaaatgcactgtgggcatggatcttttcattccgaaccgcagagaaggaatcagcagccgtttctgctggaccagagagcgaacgcctgcttcatattgtcttgaaggctctctgcccaaccaaggctgtcatagaaagctccggaatttcttcttctgatttggaagtcttgctcattgaaatgctgattctaagtcggcctgagttgattccgaatacctcctggattgatttgtgcttgaggaccggcacggaccctggaaatctcgtgcgcgcacaccctgatgcttgcatcgagcagttagttcacgtgaacgcagaccccctgcagtcagcggtaccgggtgttaacctcgctgtctggaccgctggggctgaattggcatttgttgcccccgatgcaatgatcccgcgtttggtcgatcaaattaaatatgatctggacggcacccgcctatctaagttcactgccactgatgccgccatttcacgcacccccgaaggaaccgcttttatcgatgtgctcagcagtaagtcgaagcagcctgcctttgataagaacactaaggactatgacactctgaagtgggaagaagaacttcgtgcgcaattagccgaaaagaagggccaaagccaaaagaaactcacacctgaggaaaattccaaggtcaaggcccagcttgccaaggaggccaagattcgtcaagatgttttggaagaagtcaagcggatcgaaagaggagcgggcattatccgaggtctcgcaacgggtccagccaacgacgtcgaggggtggatcaacgctgcagtaagttctttgctgtcgcttgcacaggctggtgcgggtttatttgtcggtgatgttgtctcccgagcattcatcacttgcgccgatgaggtgtccacccgcctcggtcctctgcgttctttcgttggcattgcaactctgcgagccatcggtaataccaaccttccctctgacatggaattggaacccctcggtgaactcgtgaccagaattctctaccgattacgttttgcttctgagcagcgtcctttcgataccacgtctctcgcctacgtgcttccgcttatctctctgattttgtcccagaatggcattgaagaagcgaagggagaagaagaaggcacacaagttctccttgctcttgagttcctgtcagctcactctggctcttgtgagttttaccccacgctaaactagtatgaaaccaagtgctaacgctgttatagtcaccgacgcccgtcttcctcgcgttgaggttctagctcagcttctctccgccatgcaaaaatacacccagcactacaagctggtcaaggataccttattcgacttctgccgatgcatctcgccgaatatcagcagcgaagagctggatacgctcttgcagggaacaattgtcgctgatgcctctgtccgaacaactgtgcttcaggtcattgaggccgagattgatttgactgacctcgatttttcagagcacatctggcttgcctgccacgacctggtggaggagaacgccgagattgccgacacaatttgggaagacaatgcgctagaggtggatgacacctcgttcagcaagatcatgaaatacttggactccaaggactatcagcttagaggcgctgccgctcgcgctttggcacatgccattgagtttgataagagcaaatttgcgggcattctttccgaactgcaatccaaatacgtggaagaaataaaacctaaagcacccgaaaaggacgcttatggaatgcccaagaaagtagacaatgcagaccactgggaggctcgcagtggtattgcgctggctttcaatgctatgaccaatggattcgatggtgacgagagtgtctcatttttgcgattcctgattgagaagggtcccttgctagatggaaactcccgggtccgtggccagatgacagagagtggtaaatctattatcattttgcgaggagagtcaaaggttgaggagatgatgaatttgctccaaacaaccctggaaacctcggataaagacacgaagacctctgacctgctgaacgaggctgtcatcgtcttatatggatctgtggccacacatctcaaggcggatgatcctcgcttgcagacagttatcagtgaactgcttgtggccctcgataccccttcggagtctgtgcagcacgccgtgtctgagtgtctgccccctttgatcagatcgtctgattccaagacggcagagtatgtggaaaacctaatctaccggctcttcaatgcccctgactatcctcgccaacgcggtgctgcttacggtcttgctgcagtcgtgtgtggcaggggtatcgcaaccttgcgggagtaccgaatcatgacccagctcaaggaagccgccgagaacaaaagagaaaaggatcaccgacgaggcgccttgttagcttatgagcttttcgccctagttctagggcggacatttgagccttatgtgatccatctcgtaccccagcttctgggaggatttggtgataccagcattagcgtccgcgatacttgtttggaggcttcaagggcttgcttccagaatctcagctcttacggtgttaaggagattcttcctaccctgctcgacggcttggatgatacgcaatggcgtagtcagaagggtgcttgcgatctacttggagccatggcctacctggacccacaacaacttgcagctagtttacctgatatcattccccctttgacaattgtgctcaatgacacccacaaggaagtccgtagcgcagcgaatcgcagtcttcagcgcttcggcgaggttatcagcaaccccgaagtaaagagcttggttggcgtgcttctgaaggctttgagcgatccaacgaagcacacagatgaggcgctagattccttgatcaaggtttcttttgcgcactatctcgatgcaccctccctggcccttgttgtgcgcattctcgagcgtggtcttagtgaccgatctaacactaagcgaaagtcagcacagattattggtagcttggcccatctcacagagcgcaaggatcttatctcacacttgcctatcattgtggctggtctcaacttggccattgtcgatccagttcccacaacccgtgctactgcttccaaggcccttggttcactcatcgagaaactcggagaagacgctctgccagatctcattcctaaccttatggctactctcaaatccgatactggtgctggtgacagactcgggtctgctcaagctctttcggaggtccttgcaggcctcggtacgaccaggctcgaggagacattgccaactattctccaaaacgtttccagtgccaagcctgctgtccgtgaaggcttcatgactctcttcatcttcttgcctgcttgcttcggtaacagcttcgccaactacctcagcaagatcatcccccctattcttgctggtctggctgacgatattgaggctatccgcgagaccgctctccgggccggtcgtctgcttgtcaagaacttcgctcacaaggccatcgatctcttgcttcccgagctggagcgtggtcttgcggacgacagctaccgcatccgtttgagttccgtcgagctcgtcggcgatctgctcttcagtcttaccggtatctctggcaagatcgagggtgatgaagaagaggaggaagccactcaagctggccaatccttgttagaggttctcggagccgagcgcagagacaaggttctctcggccctgtacatctgtcgctgtgatacctcaggccaggtcaagagtgcggccctgggtgtctggaaagcactcgtcgcctccccgagaacgctcaaggacatggttcctaccctgtctcagctcatcattcgccgcctcgggtccagcaacatggagcaaaaagtcattgccagcaacgcccttggagaccttatcaagaaggctggagagtctgttctcaacactttgctgcccttgcttcaagatggtcttcagtcttcgcctgatgtggaggtcaaacaaggtatctgtatcgctctccgcgagcttatcaatgccgcttcccccgatgcgctggaggactttgaggatattctcatcgccaccgtgcgcgtagctctggtcgacaacgacgatgatgtgcgagaagctgctgctgaggccttcgattcactgcagcaggtcatgggcaaacgggtcgtggaccaggtcctgccttaccttcttcatttgttaagaaacgacgaggaggctgagcaggcgttgtcggcactgttgacgcttctcacggagcagactcgcgccaatattattcttcccaacctcatccccacattgctcacgccgccaattactgctttcaacgccagggccttagcatctctagccgaagttgctggctctgccatgacaaggagactgccagcaatcctcaactcccttatggacggtatcatcgacactaccgacgaggagcttcgaacagaactcagcgccgcctttgacaccgtcctagtgtctgtagacgagtatgatggcctgagtgccgccatgaatgtaatggtcactcttgtcaaacacgacgatcaccgtcgacgtgctgctgcggcgctccatctgaccaagttcttcacggaagccgagcttgatttctcgaggtactaccaggacttgatccgcgccttgttgatttcgtttgacgacccagacaaggatgtcgtcaagtctgcatggactgccctcaccggtctcatgtctcacatgcgcaaggaagagatggagagcttggctattcccacccgccagattctgcgacaggtgggtgtggctggcgcggacttgcccggcttcagtctgcccaagggcatcatggctatcttgccgattttcttgcaaggtcttctcaacggtactaccgatcagcgtacccaatcggctcttgcaatgtcggatattattgaccggactcgtgccgagtcattgaagcctttcgtgactcagatcaccggtccgctcattcgtgttgtgtcagaacgttcggtcgatatcaagtgtaagtcatgcaaagcctttatgtggtgtctgtttactgattgattctgccaggcgccatcttctatactcttaacaagcttttggagaagatcccgttggctgtcaaaccgttcttacctcagctccagcgtacattcgctcgtggtctggccgacacatcaagcgagactctgcgcaaccgggctgccaagggtcttggtatcttgattacgctcacccccagaattgatcctcttattgctggtaagtctcaggaattttttatacatgggatgtagttcatcgctaacttttatctctagaacttattgctggatcgaagaccactgacattggtgtgaagaacgccatgatgaaggctctccaggaggtggttggtaaggccggtgcaaacatgagcgaggcatctcggcaagcgatccttggtctgattgatgatgacgctagcgaccagaccggtatgatcattactaacaattcacctgtttcacagctttctaacctgctcacagattccgtttccattaccaacgctcgcctgctcggtgctctcgtgaaggtcctccctgccgcaagctcggttcctctcatcaagtatgcatattcgttttcatggtttgattttgttggatgctaatatatttccttccccctaggaaccgtattcttactggctccctttctcatgcagcgatcctaggactcaatgctctgttggctgaatgccctggggttctgtcggaacacttctctgtcgagcttcccaccgtcatctgccaaggtcttgcaaacaaggatgtaagtggaatgctataccacccagtattgcttgaagctaattcagaaacagcccttcatctccgacaacagcgctcttgccgcaggcaaatacctcttgtccaacgatggcaaccatgctttcgagtcaagcaaggccatcttcgaggccttagcatctgccattcaagttggcaacccggtcgatacccggcggttgagcttggtagtcatccggactgtcagccgtcttcaccccgagctggcccgtcctcatctggctttgctcgcaccgcccatcttcgctagtgtccgtgatctggtaatccccgtcaaactggccgccgaagctgcattcttggccatattctctgtggttgaatctgatagtgaggtgtttgacaagtatatggccggtccaggtgcatctctcccaccaggccccaagcgcagcatgtctgattacttcaagcgcattgccgttcgtttggccaaccaggcgcgtgagcgtcgggaggctgaaggtggtgagggtggcttgggactgtcgaatgatgaactagacgacgaaaaggaattgtggagcattggcaaggttgaccttggagaggcctttggcgatgagtgatgatctgtttgcgtatccaaggagcatctagatgtttatagatatacccttgggttttctttgttcgagtcgtacaaaagttatgcatagtaagtttttgtatatttatattgtgtcattatacatcaccgggcagccatgtacgccgtacagagtggtggactttattatattgcagatcactctttcctagataggaatatcaaatcaggtgatactacttgtcttcagtatcacgtgatattgttcgttttttggccgtctacaacgaaagccacggcaaagagcgaaagagaaaaaaagaagagaaccccaaattgtaatcttgttattatcccagcatcttcattcgaacttttcccaatgtaagtaagcttagcttccccggactgcaagatcttcaagctccatcatcccaattcggactagcgttagggtatgcaccctggagcactccgcccattgtggaaggagcactcgcttagccctcggctgacctaatctggcccgcagtgccctctcaaactctcaccgtcgggatttctcagtgccacgaacatcatccgccaacgaccgtcgatacgccgacatcaagatgtgagtcccatctccaagctgttcttgaacttctcgaatgcactcccgtgtgctgtggagattcatgtcccaacacccaactcgtgcacccgaaattttcgttatagtggaggaacaacttcgtgatgtgtgtgctatgatgctgaccgggtctttcaccaccacagggtcaaccttaccacccagaagcgcctcgccgcctccgtggtcggctgcggcaagcgcaagatttggctcgaccccaatgagatgaacgagatctccaacgccaactctcgccagaccatccgcaagctcgtcagcgatggcctgatcatccgcaagcccgtcaccatgcactcccgtgccagcgcccgtgaactcaacgaggcccgccaaaatggccgtcaccgcggtctgggtaagcgcaagggtaccaaggatgcccgtatgcccaggtatgcacaccaccactaccaccaccgtctttgtctcctacatcggactcgcccgacggctagaaccaggacacagttgctgatgtcgattttctctgtttagccaagtcctctggatgcgccgcatgcgtgttctccgtcgtctgctcgtccgctaccgcgccgccggcaagatcgacaagcacctctaccacgagctttaccacctgagcaagggtaacaccttcaagcacaagcgtgccctcgtcgagcacgtaagttacaacccgaatcaaccccacggatgacgatcgaatatgaacatgaaccccttgaattacgcaaaggaacggatccaggctgactcgttctctttttcaccgctacagatccagaaggctaaggctgagcgtgcacgcgaccgtgtcctcaaggaggagatggatgctaagcgtgccaagaacaaggctctccgtgagcgccggttggagcgcaaggatgccaagcgcgatgctctgatcaacgaggagtaaatctgatacaaaaattcaattgcccttccgttgtttgacgcttttctcgcaattcggcggtccggaggttggaaacggttaacttctgggttggattcgggattctaggttgttcccgatatcaaactcaggtcggccttcggcatcttcctattagtctagattctgttacgactttctctccttccctttgttttccctgatagcatggggttcgtgaccttattggatcttttcggaaaatatggggtatgggaaataggaagatgcgatgatgatgtgatactcaagctattcttgttaagacgtaacgagaaagcaaaaggaaatctttttctacttcaccaaaaacccgaaacaaaaaccgcatgctctttcctggtctatactaccgcttgtggtataaacctgatatgcggagaagcagattgtgtccctctataagccagtagataccattccctcgatggtcttactcgtatactccctatactctcaatcttgctgctcgtgatcagcccctgtagctgacctatgagtggcatgtctattttccatgcttcatgcagactttatctcgataattccacgatccttagcaactgcaacctcgtgggtcaaagacctccaatgtaatttatggatcctgtacctcccttctagggatttgatcacctctatctatacttgatagctagcctacaacattgacatacgttttgtgtgaagaataaataaatcaaaatctaaccagtcgaagtatcattgccgctgaatatgttcatatatatctgtaccccacattcccataatcgtccgagtataaaaatctatgattagcagccaaacatcggggcgcaatgaaagtacaggataatatatgaaccatagggtagccatcgcgttcaactaattttgaagtatcccaatgacaattagacaactattttacctcgagcatggtttcatccaaaccccgagaatgtagaacgcgactaatttcaccaaccgctagaagaaaatcaggaaatgaaagcatggtagagatatgaaatactatgccttggaaagagaaataacattttgagttctcctgccctttccataccaatataacccaatgaactacccagacctacaagttcaacaccgaaatcgagatgaaatatgaatgggcccgaagggaatgccagtaagcaaataaatacaaacaatagaagaaaagaaaacctacagacatagcattcgtaagatcttgccgtcgtaaaccaaagcaaagccaaaaaaggcaagtgtatcagtgtaaacgtataatatatgcaggaagccaaacccaaaccgaaagaaaatcatgaagcaaaaccaaatccagcccgaactacaacttgacagcccacatagtcgggatcgaaggaaccgaagaccggtggtgagcattgggcggaggctcaagatcaagatcgaaggggtcactgcgcatgctatcacgcatcatagacgcatccaaatatccatgcggtacagcgagggaatccgtgcccgcacgctcgcagtcccagtgcccttgctcacgaagcccggcgtcgcgggaagaagtggagtagagcgagaccgatcgagatggggctgagatttcgatgattgcagacggcgggtttgtgaaggcctcctgcgctgtctcgccacgcaggtacatgctgtccagagataggtctggattggagggctgttgttgtagcggaatgactgggagtatgggtgatcgcgggccgatgtttcctgggatcgaggggtaggagtggtagcggtggaagtggtggctgattgatgagctcgttgagtcgcctcgtattagtttctgtctgagtcctagccgctctgttgttattcttcgtcgtcggtgacgcatatagagtgcgcaggctagcagggcgaatatcatgattgctgatcctccgatgatgctcccaactatggttccgattttagaggatgcggaactcaaattgtcggcttgggatgtttctgacgagtctgcgaccgtggcagttccgatggatggtgggattgaatgtgagtttgatggtgcggtgctcaagctggccaaggtactgatggaacttgtcgagcttacggagctagtcgctgtctctggcaagataggcagtgatgatgaaagagatatactcgggctagttaatggaaccggtggaatccacacgctgccaggagcatcggaatgccatgagtgatggtcggaggattcagaagtcgccgaaacccccatctggcttggtagaaccgaggttgttggaataagagtcgaaattgggggctccgagatatcaggtgctgtgatggtggtgtcctgcttaattgtccactgcgtagtcgttgccagagtcacggtcaccggggttaggtccaatgttaacgataggaagtcaagcacactggccgcggtgctggaatcagtcccggattcagatatcgtgtagacccatgtaggatggacagtttgcgtttcaattgacgtgactgtcaccagatttaaaggtccagaggataatcgtggggacaacgtctgtgtgaagttgttgagcggtacagacggagtatcaatagcggaagaagcactcgacatctcgccgagagcccgcagggggcaccgaccgttaaaaggcagatctgatgatatttgccgagtccgtattcgatgaatgggacataggggcgacgtgaaaggatggatccctttgtatgcgtattggacaaagcacaaagtgacaaagcaaccaacaaagcagtaggcttattaagttgactctgatggttcatccaagccacccctatttcttgttttgttccttgaagccttgagatagtcacgaacataatcccgtcgcaaggctgggattccatacagttcacgattcaccttcgtggtccaaaaagtgtatcatgtcagatacagagagattaaaagggtgtatacagagacctttgttttcccccgcagaatttgtgaggggattttgcttttcatttgtctagagctcggcgcttcttgtgatgggtagaagcaactcctgtgacagatgaacggcgcttagccctcggtccaataagaccatcaggcaatccacgggtggacgatcatctccagaaaatatgggaatagaatatccataatgtgacactggctaaattttccatatgcgcacgatctcgtcattattgttccctaggtaggatttgagcggggatgtgtatcatgtatcatagacgaaacacggcagtttcggatttggcgagagttttattgaaatttggactggtccatcctggtgacttcttgaagtttcatgttttgcctagctcggctgttggtatcttgcaggcttttgcaggttttgcagttgagagtatgtcgtcggcatagaggaatcgtagcaatgcctctttggtagagtcatgtgactatatccagataagtaggagcagtccacatgtatataatatccataaatgatatacgagaggaaagggagaagcaaaagggcagagactacagtactagaacaaagtacggagcaagtatgtaggagagagagtgtgatatcacttttacaagaacattcccccctcctctgttgacccgatgaaagccctgacgaactcagtcatgaatatttcaagtcacaaggaaaggtcaaaggtcataagacatataaatggtagaatttatgcatcaaattcttttgttaagtcggagagcgctgaaggacaaatgttcccgacaaattccccaccaaaagttccccagttcctttcatcttcttccatctctcttctccatcacttcatagggaagttgtttttttcttcgacttcaacttctctgtttatttacctgccaacttatctcggtgcttgtgcctttggtgcctttggtgcctttctgcctttctgcctttccgccttcctgttccctgttgtgttcccatgtgaccttggggactagaactttgcgataatcgtgcatttgcatttgcattagagctgtgattgaagaatgtttggctggggttctgggctaggtaagcaatctcccttttgctacccctcgatgtttcccctcccccgccatacccctgtggcaagtcgaaatgtcaacacaagttcacctggacagccttgttggattggagccctgactgtggcttaaagttctatgcgaccttagatatgtcagccagacttgaacgagagatgaaccacacagtctcaagctaacacaacttcgcgatagccttgccctccgccacttcagagccggagaaggaacgcagaccccccgcagacccgacacctctcgatttccccgtctataacctatccaatgtactcgaaaatgagtcggaatcaagactcaaggagatgcccgaccttttggccgacatcaaacgcccacaggacatctgcgtggagcgcttcgagccgttgaacctacaattggaaaccggcgtcgaggtcgcccatatgatccccgaagaccattcgcatcccctcgcccccttgccatgggaagataccaccgaaccgacggaagacaatcacccaccgttgatgggtaacggagccccgtatccctcgaaggaacgatacgaagtcctggaaaaagagctagcgttggataatgacgacgctttccgcgaggtggctcgattgccgccgcgtgagggtcgcgacagggttcgtataacacagtcaaggaagttctggacgggattggagcgcatggctcaatactgggataccagcctagaccattactacgagcgcccggcaacccccgatccgacacccccatctgagatggagcaagcaggggatagcacaatgcagatggatactgaggagtccagtagcagacatactctgacagaccatgaaatggacctggatgaaggacagacggtcgcgccttcgaccagcggcaatgttggcgataagcagcggccctctgtccctgtatacacgggtcgccgaattggcaacggtgccgagatgcccgatgaaattcgtgacgagacaatccgagcctttgtggagatggccgcatggccattcggatgccaggtcacagtccccacgctccaaccacggttgactaccaagaacctcctgttccccgtccggcaaacattccagtcctcgcggtccccgcgagaccgccagatcgcgcggagcggcatgctcgaaggccccgttctcatctcacagtgtcgacccgagacatctttccgcactgcagacaatacccccgggaccgggattggcgatgtaagtgatttattccgcgaagtaggcggcatgcttctcgcggcgcaagagcgtgcccgcgaaggtgcagtcgagaagcgacccggcgagggcaaatggtggaccatgcagcctcgcttcggaggcgcccccaacgatgggatcctggatgatctcgttaattacggacacgggatgtccttgccggactcaatgatggaagaaagcacgtcatctgcccaggaggcagagagcgcttccaaacgtcacaagttcgagcatccatttgtcacgtctctctcccggagaccgagtgctatgcgcagacttactaccagtgagaagtggaagatactgcagcctggacctagtctttgggacaagcggatgagttatttgcagataggcaaggtccaggagagtccgtttgacgatgtatgcatacccggcctcgttcattgaaattgagtgtgcttttgacggccagacaaagctaacccttcattcttttttttttttgcagatttacatgatctcatctatcaaccatcacgtctcaatcctccacctccgcgttcacaggcggtatttggacatcctcacccacggggacagcaccttcccaccaaccgaaggcgagccgtggcatgtgctaaagctgcagaggactcgatggttcgacctattcgatgccaatgaccgcatagaagcgctgaagggtgtgtggcaactattccaccaccagctgagacagacacgccacgaaggcgacgtcccaataccgaaagaattacctttagagtgtccattatagagcatgcatgatgctgtccgtggggacatgcttttgactctccggctctcagtggcctttctcaagcgatgcatcttgtacatatggcgcagcaatcttcggattcttcccgcttgctgccgaccttcactccgttttctacaccatacccatcttcaatgaatttacaatcttgagcatattgatatctggcgggcaatttatatcgattcataagtgatatctcttttcgactggagggtggttagatgggtgatttgggatttgtgttctgctttgatatgcttctatggatacatttttgatatctctgttttatttgtggacaacttggtttgatataatgcgtacatatggcgagaccttgacccgaaattctatcgatctgttctcagtcaggaggatccaattcaatcacaaccatctatctatgcataacttcggagtgtataaatcaagtactttctcacccattcaatatatctcttacactgtgttgtcgtaaccatccattttcactgccataaaatccagttcataggtaatccacatcccaacatttgaaccctcggtacttttgtcatagtgagaccactccaatcctatacgaaatcaccaaccctcacaacatcatcttctaatgaaatcaaaccaaggtgccggacatattcggcgtcaagactcaaaacccatgacctcacacaataaccccgatcatcaaatctcgccacacaccaaaaacgatacaagtaaaaaagcgagagcgttccagaccagccaaaagccgaccaaaatgtgatatgtccacatgatagtccctcttaaccctgcttcggttgtgtatggcgtagatggtaggagagtggagcataaataagtgggcgccgataccctttttggtgatatttcccgatctttttttctaacttcgtatacatactccgtactatacagatttacttctaatggcacacgtttccggggctgcagagtccgggcttgacagacccgacattccctcccgtaagtttctcggttacggggttcgcttgttgcggaccgggataaggctgtgtatacggagtactatatatgccctccgtactccattccctgtctgtgagctggctagtgggatctggttgcggtgagagtcgtgtgtggcaatagatcttcatttggcttttgtttcagggtctgataggccttggtgtggtgaaataggagctggttggatgccttggaaagaggaagcaagaatatgcaggtggatttatccgttgatggggttgatttaatgcttgtttccgtgtatattgtgtgttttaagcacaagtatatacatatgtagttatacatcaacggatttcgggatgggtcatggtgatgatatgtatagaccattccatgtaaatatttacttacaacatactccgtacatgaaatgattaaaagtccaagccacatcatccaaggctaaattattcggtacacacttcgtattctatataaatcctatcattcaataaaaccaagtcgtattccatacctaattggcctctcccaatcaaacccagagaacccccaaaacccgggtatcaacaaccgccagctgcaaatcagatcacatcacacgttcaaaacaaaaatcccaacccaaatctaactagtcctgggagcatatgacccgcctagcagatccataaccccctaagaacagtagagacatgggaacctcggcacggaagaccgcctaatgtggactagcaaaagtatggcgcgtacccgctttactgcaaaagccatgtggaggccgtggagagtgaagattgaagagattcgtgttcccgaggaccaagagaatgaatcgcggtagggtgtatgagttatgtacttttaaacaagagccagcacttgaacagaatgtggctaaaaggctaatagtaggagcacggaatacaagagagccttgaactcagttgactataatggtagtataaggtgatcaaaatgaaatataatatacgagtaacccaacaatctagttgtttggtctgatggattgaaatgtatgcgagtcgcttcatcgaggacgcgttggtgggggtgtatttgtaggcaagtacccctggaggttgacaacctcaacttcaatcccaggctactgcctaatagagaaatacatatgcaggagcatgacttgtgtgtgtgaatggtatgcataaagtgggtgtgattccaaaatgtcggatccgaatactccatacagccggtaggatagttacgtttgaaatatttgtccttcacggcaaggtacacagccgcgctaagaggctgtcggcggcccggcggacggtttactttgctgtagtacgaggtacggaatatacagagtacggagtacaatagggtgggaggccgctagtagccaataacttctgacactggccggccggttcgaaatcggactggactctcctctccttccaaaagggaattgatagtagctcacgagaccacgatattggttggaatcttgactttcgtgacttttgcctggtggtgggctagagcctctgcaagagcacagatcgggatcagggcgccggtcttgttcttcagttttttgttttcagtttcccttgcatctgccgaacggaccattggttcatgtgagtgagttgggtctggtatttaagcctcaggtgtttgtattgaattgctactcaagggatgatgcagcgtaaggagggttgtttttcatatgcatctggcctgatctagccctaaacttgatgaccttgcggaaggcggtagctttgcgccaggtggcggggctggtatagacaagtgaattgcgacggaatatgacaagtagggggaaaaggtcctccagactcaaaggcccagcgataggtcaggccaagtagatcccactatgaccacatggaaccgaacccacgtgggagagcatccagccggacttcagtggctaagaaggcaagtcagaagcgatcttgacgtatcagttgcacagaccactgtagaaacagggcgctcaaagttgagacgagatctcacgcacggtgaaagtctgtgttgtacaatctgtacacatcacatttcccttttgtggagcgtggaggttatgaaaccgaaccgtgtcgtgcatgcggggatgggcggagaacgaataacactagattccaaattgattggtagttccaaatcaaccttttgagatgagctctggcagatttacgaatctgtgtttgctatgcagaggagcgggagagccccgatcgtgaataatcatgtcgtgtcccgtgaaattctggattccatttcgataatgccagctaagaggcccacgaagcaagtctaggctgcccgcataactgatcatctaatgtacagtggtgatatgtctagctaactagttgactaactatggaatggaggtgatcacattttagctgaggcggcacaaccaatctatggacgaatcacgcgcttacatcgccgatgaggcctaatgatttgagattctaatggacattgagatatcgtattgccaattcacctatcagtattgtgaagttttcggcctttcagcattatgtacgatatatacccggatttcgagaatcccagaatatactctgtggactagactagtaagaacccacgctctgcataatcgtgcgatatgtttctggagacaagacatggaggttggtgggctggagttgcggttgcaatttggttttgaactttgtcattggcgcgtgtcaacactccctttttaggctatacttgtccctcactagccttacgataaaagttacaggcaactacgtcaatatgatatattgttgatgttgttgtaacacagcatgtccatgcatcttgttccatccctatctagatactggaggtttaagctgcagcccattactgcctaaatatgccaattgcacatcagagtctcagtctaatgcgaggaactcgacctattccgcgaccgctatgcaatcttccgtgttgcctcccctcgatcgatgtggggatgtttgtcaagggagaagatcgcctgcatcttccccatacggagctattccaatgcgaaggtgatcctccgtgctgattggatgtgatttaggtctgctccatacttgttcagattctgaggctttttcggacgcaaatctccacgcagtacggattactcagtactttcaactatatttctaggtatagcttacttctgagtgctgaacgtgtaggtgggtagtagtgtcatcaaagctcgagcctggcgttgcggtgcgagctcagggattgaggctctaagatacttcatagtagcattgaaagccaggctatgacataggtgtgccattgagagactggactttttttcgtttccagatagtgatcatgtcatgttgtggttaccccttgcgttcgacattggatatctaatgactttgcaaactctattccagatatctacatactgcaagatgcatggcgtgcagtcaccatctgcacgatgtaggcccgtgttattttggaggctagatctgttttttcaatgtgttatttccggagaggaataaatagatgcctgatatattttctttcattcctccttccccattaggtaaggaaatagcccgtgccgattcttatgatacccactaaaatcaagactttgggcagcgacgcgtagccacagataacggagacccgaagatctaaaccaatgcgccgttccaaacctacggaatataatagtggaaaggataatggaagcggcagatcgacagggcgagtcaaaactggaacgcagattggatactttctatgctgctcgtgattgaaatccatgtaaccccgataccccttaacggtggcaagaacttgcgattcagctgtcaaccagtgggatgtcttggaattcgcaacggaccgatgaaagatcattgcgagaatggactttgcttctaaggttaggttcggattgtttctcattccgacttttcaactcagattccgttcatgcaggtcaaatcccgtactcccatgttaaagcatacttgatatggaagaattacttctcgatgccatggaggattggaattaatcaaggaacatttgaacaaacaaagaaagaaaatcatcgcctaacaaagtcttggctccacgcggactatttgcactataagtagccctaaaatttgtatatatccacacttcatacactacccactatattcggaatacactggcatacaccgcgaacttgtactccgccacaatccttcaatccttcagcttgattcttaagtagttaaagcgggtggccacacagataggacacaaattaacggtcaaaagaaaaaaccaaaaaaacctccaaaaaaaaccaggaatgcggaggcaactctgtgctctcgtgccactttcaatcgcgcgtttgactcgctcagaagtcctccgactagggaacaccgttaagtcttctgtggcacggaggtcttgagctgcatcctgatcaagctaggggtaaactgtgttactgcctaagttgggaaggaagtgagttgctaaatgaacgtgatgtagtattcgtttgatgccaggctctaacacgatctcgggcagaaacgtgattaaattggacagcatgtcaatccaatccactttctatagactagaatggtttttggagtacgaagtagtcttctggaaggaaacccctggaacccgtggatggttcccgtcgtcatccgtggatgggaaaacgggtaaaccttggaacccggttttactatgtcaggtatttatggtaattaccatcccatttcatgtgtctactaactatggcatactatcgatgtacattatactccgtatatgttataattgtatgttattgccccaatatagatttcaaattcagtcgaagtgtctttcagagtggatgcccccaaagtgtatctcgattaaacggagcaaggtgcccgtagccctgggttgctgatcagccccgacaaccatctccctgggaagccacgggataaggtatcccttcgagtgactagtacgccgcggtggctggaagctttctgccaacatcgccgatctaaagctgcatatccactgatttgagaatcgagtccgaacagagtttatcttcagtgttttagaaatgaagcgccccttgcgagttatgtttccgagtctatgaccgacttgacggccagtgcggcgtgtgttattgggtgcttggggcgttgaaggatattgttcttggcatataacatacacctccactgcagtttcggttatatactttccgtgttctcttggaagataatagtcatagatatgtggactgatctagatatcttgttctaagagtacccgagtcctgggtactgggcagcgatccctgtccgacacaccggtcacatggtaatgaagaagggaaaaaaagaggattattaggtttagaatcaacctcaaacaccgatgttatcactctattcttgaaatccgcccaggagtcctcatcctaagccataatccaagggcaatccacccagtatacgtaactctcggaatcaagttgcatggcgcatttcccggcgaagcggttgaccttcgggcggcaagttcgatccccgttccacgcggaggatcctagcttcgatcatagcacttacatagtattctatacaccatagtctatcacatctagtgatggggtatccatatacagacacacattgcatattgtaactatatcctaaaatgaggacactgttaatttctttcctgcagagcatctcatattttcccccagccgccggacccactgcctggtaaatccagcaaaaggaaacaaaaagcagacctgtcaactgtaacttgtaagtattgtactccgtaagtattagaggttggtgcttcttttctcaggggtctatatggttattatatactctgtgtgagagatcaatggtcagaagaagtcatcggggtcatttgataatttctttttctttttctttttctttattttccttaatttgtgtccaaattcgaggtatttgatagtcaccgcgattctcaagagcatgtatttaatccagggaggggcaaacaccgctgtcgatccctacaggcgtaattataaccaagtgtgttattactttatgtcccccctcccctcctggtttagatcatttctccccttttgtccgattcttgattttttttcccttccatagttctcttttcgataactactgggacgtgatatatgtacctcggacttcaactcacttggcattgtcattaacctagaccgtgaactcaccttacatccacaatatactacgagtatccgaatccgaaccccccacttagtctacggtattggactacccacaggtacgtggttatattacgctcgtaccatacctgaccgaggtaccaaccgtgtggatacggagtacatggaatgttctcaaggttccaacttgcacttcaggtgttttccccctccttgtggcccaaccttgtacttctgtttgcgatctatctgatatacgggtggatacactgatctattttgatttccttgctctttttccttttccttgatatttcccatatctcggcctaacgggggcccctggtcggatcatcgccgtaatctgactatttctttgtctagctccacacccggttgcccactgcgccatcaccaccgcatttttgcgacctaggaaattcggagctttagacacgttatttgattcgcacgcttctaacggcgcgatctgatttcattgttacaactttcgctccttccgacatcagatccaccaatccgtcactcattcgtttccttttattacatcctacttcctcgactccaatcgatagcaccatgttggcttgagtcccgatttaccaagctcaatcgcttctcaacggtaaataccaagtgccaaggaccccaggctagttgcgacaagaccacaagacggccgcgtcttggtagcttcaaaacaccggcgcacatcacccggaccctccatttacaatgaatcgcatgcctcccccggaagggcaccacgcgcatgcgggttcgcatgtagcatacgacccctcatggcgccctgcataccccccgacattcgataaccacctctccgacccccgccgctccgcaaacccccagactaccctacccccgcagccagcaggataccctgtgatgcccaaccgtgagctaccacagttaacaccggaaggcccctacggtcgtccgaatggtcatggcctgcccctacatgcgcccgtgcattccccgcaagacccaattccccagaacttccaccagccaatgaatggcgcgccgcatgaggcctcacctgattatcgccctcgtatgggctacccgcccccagatcagatcagcagtgctgagcatacacccgtttcgggtgccctgcctcccgcctcccaattcatgacacccgttgcccaaatggcgagtgctacgccgcctgcggggtatgatcaggcattttatcaaaaccagacgtttggagcacgccagcgtaaggcgaatagagctacgcaggtatgttaagctagtagaacacagtatcgtttcgggggatcccagactaatactcgagctatataggcttgtgaccaatgccgagcgaggaaagcaaagtgtgatgagggacgaccaaattgcagtcactgtaaagagaacaatctgggctgtgtctacaaggaggtgccgccacataaacaagagaagaccacccagctggtattggatcgactttcccagatagagaaccgcatggaggagcgagacaaccgcatggatgagcgtttcaaaaaaatgcaaatgcaaatgcaagagcagttgctgaacaagctgggcaatcaaccacctccgactgtccaagaacgtccgtctcttccaccaccgccaccgctcatcaagcaggacccgcctttcaaaacagagatgcctcgtccccatgccccaactccaaatattctggatcccggcagtcaatattcacaatttggccaaaatctgggacccatggacccgagactcgaagatcagagggaggctgagggagagctctccatcccagtggagcacaccactgcagctcacaagctattgatgtggccgtcaattaagaggctgctacaccctgaacaatatgacgaggactatgtgatgcgtttggaagaagagcgcggtctcctgagcatatacggccaaggcgagatttcatacaccgccgatgacagtcaattaccaatggatggtgactccaagggctccaagggtgtccgacccgacggggatggcgcaggaccagatgctgatgtcgacatcgacgaatttgggaacatgaagctggatgctgcaactgctaggcgctactatgacagctacatcgagcacatgtttaagctccacccattcctcatgatgggtgagctcaatatcaaggtcgacaatttcatccgatgctattgtcgccctaatacttcaccgagttcggcttccagttacacacgactagcgcgcgatgggccgccaccagccaaaaggaggcggtcgaacgaaaacctaggtgtgcgtggcgagttcatgcagagcatccccaacccgccgcggccacgggtcggcaaaaatatcgacaatgccttggttatcctgtgcctggcccttggagctatttgcgaagctcctgcccctctccctgggcctatcatggacaagaagattgactaccccaaccagcgcattcctgaaccgctgccaccgtttattcctccgccgaccctaaatgggacatacgttactaatggtgtgctctcccccgcaaactccgactcggcggccatgcagatgtcgctttcgaattctctttatactgtgccaactcagcctcccgggcagtctttccctgacagtccactcaacaaaggcataccaggtctgtcaaggagagatgtgacaaatgtgcaggatgaacaagggaacacaaagaactaccaggctattcctggcctgactctctatggatatgcgaccgcaatattgggccatctacagggtggtaacgagctagagcatgtccagtgtgggttgctcgctggtctttatgccggccagctggcccaccccttccaaagtcacagctggatttatcaggcctcaagggcttgccaagttcttgtgagaacaaagcgatatgagcgactcgaagaggggcctacgcaggacctgtataacttcgcttactggacgtgtctgcaattggagagtgatctgctcgcggagctggatattccagcgagtggcatctcccgctccgagggtcggatggctattccgaaaggaaaatggactatcattctaccgaacgatctcaacgcaccccaaacgatgatgatgctgttttattctgctcaaatccatctacggaaagttttgaatcgagttcatacagacttatacaaggtcgaaaagcaaggccagacacgatggtcatccaccgttcaagaagctctgagcctaaacctcgacctctggcgtaaaagcctcccacaaagcatgcagtgggacgaaaacgatccaccagcaaacgaaattaacgccgctcgcatgcgtgccaagtattacggtgcccggtacatcattcaccgacctcttctctaccacgcattgcactacggccatacaggtgctcgcgtcggtccagtcggccactcatcagtgaactcgcctacctcgcaacgattgtctccctcaatgctgcacagtgctcgggctccgcacatggcacgtatgtctagtgacataggctctatgccggccgcagtctctgcggactggcaaccacctaaagtccgtttacaagatctgccgaggaaattgaaaggggcctgcgacatctgcattaaatcggccattaagagcacggaggcttttgacggtgtaggcggacatcggttggtcgttaccaacattttcggcactgcccatgcgtaaggaatcctctgaccccgtttcaaagaatcacagctatggagatgagactaacctattttatttgcaggcaatttggcaatatgcttgtcctatctgcaactttcatgtcaagtttaaacgagcttgtcgagccagagcaactcgatcgtctccttgtccgcacaataggattcctcattcaaagcgaaaatatatcccccaccctccgcgctgatgctcgcattctcactgaaatctacacgatgatcttccatcatcctcctgatttgagacgagtcaccagcatgagtagccacactcccagcatgagcagtcatacccccagcatgaacagccaaactaccagcatgagcttcccttaaatgtgcatccagcgtccaagttattttttttgtcctgttcctgtgggctttgcaacccgatacctgatatcctatatccttatgaacacatcatgcatgtctctgcctctgtcccttcaagcccgaatccttacacgctcaaatctgttatctgcctgtcttctataccttgtgcactatatagtccttttcattgatgattccccaaccttatccgattcaacactccacactcgtgcatctgagacaagatcagatgacacgggagttattggcggtgattgatcggtatggcttatttttatacgccgagaaatctcacccattctttcattgcctctcttcaagtgatgactggattggctttgactcgttcctttttttttttctcttctctctcttcctcttgtctcggatttcgaagcatttcgtggctccgacggtttgtccccgcagagatacgtggagttattgtcttgtgtggttattctatttacatcacatgcatcccaagccgtacacgtacgttggatgttcttggatgctcttacaatatgccaacttatttctgtgatttggctgcgccatatcgttttcatttccatattcaatgcgaaagtttgcatttcgtggttggcttttggtgttattgcattatagctcatctttagtgtgagctgtctttgggggattagttgctgtaaatttccttctcggtagtttcccagactggacaggacagatcaattgagatgaagtcctgatattgctcgatcaaaccctagtgggaatggtagctttggggttcgtgcacaagcttggaagtaccagaccctgcggttttgtgggcccttccgctcccacggtttcaactcccacggttttcatcagggccggccggtatcaaaccaaaattattcaaaagtctaactagaataatttggacgaataggcatgtatatgctattattatacctatcattcctgacaatcacagagaaagcaaatgcatgctgctcgcggacctcggcttctctgcattgtgctgatcaagagtgtgttagagaccgtatacatcaggcatccttcgttatctttcaggtcttgaaatggtaaaaatcgacatacatcccaacccagacatgacaagaaatgcaagaaatggacctcaagagaagagatcgacaccttattcctataccaaccagccaatgcttatataacctcaatcttcacagctgatgtgcacggcaaatttacctctcgaagttacttgccatcattgcttttgcccaatacgcagtccgaggctgttataatgttcgcgtcgaacatcgcagacgtagcctccaaagtccgcggctcctaatcaacaacacaggcatctataccaacaaccccagcctatacgtgccgcttgttcgaggtcaacccgctcgcgcactactggctctggcaggagtttctgtctgatacgatggaagcgaagtatggtatcgtttttactgtggctttgcttgctgggctcaccgttgcgcattatgtggtggattacttggcgtccaaggctgcggctatttcgttccacggggggcttgttgctgagctggttacatgataccatgcactttatgttcgcactgtccttgcgacccaaggcttcattaaaaccgttagtattgaagatttgacccttgaggatacttcgtttaatcccccgcttcaccctgcgaccattgccgcggagcttgttaagcaagcgcccaaggctgggtgtggacatgttgttgtgcctggatctgtttggtggattgcaaaatgatcaaagggctgtctggatggttacagcatttgctgggatgtaggttggagaagggtttccagtttgatggagctactggttggacttgggttggtctttgatactcgaatagtgagtggtgttgtggctatatggttgcgctattatctgtcatgttgatgcagatagttattgcactcttatgacaataatatttgcacacccatttaaactactttgggtatagcgcttcttggccaggctgatgcttttagttgttcgcaatggtacaggtagcatgtgacttgtttttatataggcattcgggagtgctctctgccgagaaggatagaatggatagatttagaccagataccattatcttcagatgtatcgtcgaggcacggagtattccgtactctatacttccatagatggctgggaagaagtgaccccagccagccacattctggtccgtgcacgatgcttcaccgcgattttgattcgctccacttgttgcaccgacagttcatcagcgctatgaacacatttttcacagttgcatttctcagcagatcgcctgtatctcatctaacccctaacacacagattctatccgatacccaacactagaacaagagaataaggtgaggttaagggccatcaagttgagatccactgggggccttttcggatacaagatccatgggtctgctccgttgtttactcccccaaacaaacccataacattgcgttccttctgacttacaacaaacacttccaccccacacctgcccccattccaatcattccaatcattccaatccttccaatcctttcattccacatggttcgctccggctatccacattaattgcctactatgttcaaagccctgatgggcgggggccgctcgtcgtcctcatccgacgttcgcagcagttctaagagcagccggcgcaagtccgacaggcctgacaattctgacacaagatcgatctcaagtcgcaagtccgcacggggtgacgaccgtgaccgcggcctgggtgatttgtcgtcttattcgtcttcggctccccgcagtaagcgtggcccacttagcaccgctggcgactctatctcaacctatgtgaccgccgagacagaacccgttgatgacgccgatcgcgactatattgaacgcacacccaaacgcagagacagtgaacgagaaagcaagagttctcgtcagcgcgaccaggaccgatctgaaaatccagagcgtgagaagagaggtagccgccgaggaacagaagatactctggacgatgacttggatcgggagcgcgacagtcgcgagcgtcgccgcactcagtcaggggacccgtatgtgcctccgatctccacaaacgtgtcggctagtgcccccggcgcgcagtttgccgccgagattggcgcaccgggattctcgcaattccccatgcaatacgacactgggatgccatccgcaggccattctccagcgcatgaagttccgtatgatccgcacgtgcagcaacaattccccggccaattccccgagcaagtttctgccccatatcggccgcctaaccctgctggcgctgcggcagactactatggtgaccaaggccagtctgttgagcaccagcccggtgttcggccggctcccccaagtgtgcttccgaacacgcaagctcacttgatggcagcatctccatcggctaatccacctccagagcctagtagcctgggcgaaactggtgcggcggcggcctattttgacgacaacttccatgctccggcacagcaagatcagccgccgatagtgcctccatttaaaccatcgaaaccgtctaagccttcgaacccttcatcgtcgggcgttcttcctgctgccgccgttggagctgccgcctatggcattagtggtatgatgtctcactctgagtcgcattcccctccgcagcacactacttcgtacgtccagcagggtcagccaacggtacatgaccaccagccaacggtacatgaccaccagccaatggtacatgaccaccagccaacggtacatgaccatcagccaatggtgcatagccagtcaatggaataccctccattcaagccgtcccattcgcatagcttcagtgaaggtgtcggcattgcggctgcaggtgctgcaacggggtacatgatagatcatcaccatcacccctctagccccgagcacgcacctcattacgcttctcagcattacgagcaatcttctcaggctggtggtatgccgccgtatgcccctggccctagtaatgctttgtatgctccaagcgcgggtggatacggtgctcatgctgcctacaacccgggttactatcctcacggacccagcgctctggctttccaagagcgtcagcgtggtgccatgggaagatttgttgatttctggcgtgaccctgaggccgttggaagatttgaggactacacggaaagtataggtgtgtgcaaatactgtttccaacctggtacgagctccatcgatgctcctcgcaagcaccattactacagaaaccgccgacactccgccgaccggcggagcagtgggagctccagagtaagcaaaaacagccgatacaactcctctgaagatgagggccgccgacggtcaaagtccaagcagtcttcctcgtggctgcctggcatgctagccggttatgcgaccaagtcgctcttctcgagcaaggagtttgacgattcttacagccttcgctccggccgagggccctcctcccacagggaagaagatgaccgaaggagccatacctctcgtggtgtgacccgtcgttctggccgcagtcctcacagagactatcgagcagactccaagcatgcatctcagtctggatattctcggcacacaagctcccgatctaggtcttcctcttctggccggcattcgtatctcaaggaggccgcacttggtgccgcagtgggtggggcctcgcttgctggtgcaaagtcgcgtaaccgctcccgcagtcgttctcctgaaagacgacaacgccgaaaggattcatcttcatcatcgtcctttgttaatattcccaggcccagcaagaagtccatcgctggtggaatcgggtctttcttcacttcttcttctgagaacaggaagaaacatcacaccaagaagcggagcggttttttctcgttcaagagtggctcttcatcctcttcattggacaatgatcttgccttcggacataggctgccaataaaatcttccaagcctaagaagaagggcaagaagggtccagatgttgatgccgctttgctggaacttagcgacacagcaacccgtttggctcgctcctcgccccatgctcctgggcgcactgcaggtcaaatgtacacagctcgaccccgacagtctaactacgcccactctaccacacaggatgaagaatgggtcgatgctgagtcagaggaccagttctcttcaagtgttagctctgcgctcgcattcggggaaagcagcaccgagtcttcctccgactccgccagtagcaaatggggctggagatggggaagcaagaagtacaagaagaagaaaaaggacaagcggttgagtgctacaaatgccgctctgatagctggcgctggagccgctgtgatttcttccgctcgccaccgtgatagtaaccccccaattaggcctggaagcctgcagcaagtttacccaatgcctacttccgacccatctcgctttgatgtggcatctgtatctgcaggagagccaactctcatcaggccagggcccattccccttcagcagcctcagcccttcaccccagtctcccaatcagtgtacactacccagggagctgttccggggtcgatccccgcgtacagcaccccagtggccccacccctcttcgccaatgaagttgaacactacgactcgcagtggcagttccaaggtcctcgtgatgcagcatgggcaccagcagaatcaacatacgccgaccgccgcagagatcatcgacgcagtgattcctctcctgttttccctacccaggaaactgcttccaccctcaagcgccggttcactgccaaggatcaagcgtctgtgcagtttaaattgacggaagagcaagcagagagggaacgccaccttactcgtcgcaatgagaactatcgaggtgaagttgctgatcaaccggttcaactgattgaccgagaggaggagctggcccaccaggaaactgagcgtcgagagcgacgccgaaaggagcgagatgaagagcgcctgtataccggcggcagagaaaatgactcctcatcatgggttgctgcagcggctgccggagctgttggcgctgccgctgccagcactattctttctcgcaagacaaatgatgacgaagcctctgaagccagccagcgatataatgagcgccgagaaaaacgccgcgctgagcggaagcgcgatactgatacagtagcggatgcgatcgtgtcgcggtttgagcccactcagcctattaacgaagaagtgaccacgggggaatactgcgaagaccagaagaaagggtctcctcaatcaccccgtccagcacaggtttatgatgattacgccgaattttatgcccccgaggagatacgacatagcccagatgatcatgctcgcagccgtagctccactaatatgcccaccattgtggagataaagcccgccagcgaacgaggtacacatgaggagctcgcccccacagagtcaaactattcatacgaaccctatcaacacgtggaccgcctcccatggcgagtccctgggctcaacttaattgagccaactcctccccaaagcgtgaacggtagtgctgttcgtgacgctacttctccaaccacccctgtgaataagtcttatgataccaagcctcacgaacgaccaaccggctcccgtgtctcctggggtgagcaccaaactcacgagtacgaagtcccttcttcttctgagcaggatcctcttgagcatgatatttcccctaccgaaatttccgccaaggatgttcctctcccggcatccaagatatcccaacccaaggatatttccggcccattgcaatatggggccgatattgaattcgcggccacaattgctgctgcgaccgccgcagctgggttcgacccctctttgatcacagacgacccatcctaccacacccgcacttccccccccgggtcggagaacgaacacacatttacctcaccctggtctgcaccggctcgcaagcagccccacggcttcgtcgagggcgaggtcgaagaaactgatcccaaatctactaagaatatcacttctacccctgagcatgtgatccaggacaaggatgagcttctcttcgacgagccagaatccctcttaggagatcaggatagttcgtcgggccgccgtgacaagtcctcaattgcgcaggaggtcattgagcagctgaatggtaaatatggcaagcgcgaccgtaccacttctcctgaaaaagatgtagatgtcctctcgatgcctggtggctttgatacagccaactctatagacttagccgacgccagatccgtggtctcagcgccggcgcctgttatcatggacccggagaccccgaccaagtccaagtctaagaagccaagggagaagggcgatgccgttgatctctccgagttccaagagcgggaattcgccgggtctcctattctgaaggacgagacaccgaagtcccgcagctcccggcgtcgcggcgacgattttgagatttatgaatcacaggggacgtctccatctcgggctgagacttattctgttgtctctgctcccgtatcgaagggtgaaacatccaagtctaagcccaggaaatccagaaggagtgataatgacttgggcattgctgaataccttgattccgtggctccggagtctcgtgatgattctgtctctgttatctctgctcctgtttcgaaggacgagaggttcaagtccaagtcccgcaaatctcgacggagcggggacgatttcgcgatctacgagtcacgcgaaccatctgaagctcgggatgatatccgctctgttaactctactcccatcggcaaagagtatgtgtcaaccaagtcagggaaaccaagacgcagtggtgatgattacgagctccctagatcgcaagagatctccgaatctcgtgacgacaaccggtctgtcttctctgcacctgtctcgaaagacgagaccagcaaatctcgccggtctcgacgtagtggcgatgatttcgacccacgtcgtgatgccgaagcggcttctgatgacgcggaaggtgacgaggaaaaaaagagacgtcgcaagcgtcgatccaaccgcgaaagtgacaccttgtctgtcgatgacgatgctcgcttgaccattacggacattggagacgacaagtctgagcgccgcaagcatccctaccgctcatcccgtgaaactaacattgatgacaatgcctctataccctcttctccagctcaggttgacgagtccctggagaagcgccgtggcaaggataagaaagaaaagagtgcaggctttttgcgaagtgtctttggctcacaagtctcggccccagctgagaatattcggcctgaccattctcgctcttcttctttagataagcgctcatcccgcgaagcgatatctgaagctggtgtggatgatgaacgccgtcgccgtaagaagcaccgcagctctagcaatgctgatgagctggatccttacatgtcggacaaggagaggagtactcaggacgacacaaatctgaaggagtacaggtctagtagacagcaaaaggaagagcggcgtcgtcatcgatacgaggaaatcgtggattcgggaaggaaacgggaatccgagaaggtatagcatctgaacttttctttttacctacttatgttgtgattcttgttgtacactttattttcccatatagcttcccttttttcactggttgatctaaccagcttgcacaaaaaccacaaaacccgaacaaaaaaagaaatgtactaagcttttattggttttattccatgtgcaggacggatatagtgccaacttcgacgaccaattctttctaaggaagcgcccggatattctagccgcggatcagcgtgaagattatggtgcttcgtggcttccagccccagcggttagcgcagctgttgtagctgcaggatcagaacggaatgagatcccgcagcagaggccccggagccaatccacctctcccccagccacggagaggacacttgacttgaccccgaagtctctgagccgccccgcttcacctggaacaggccgcccccaggagtccccattccccaagcaacgccgacactccgtggctaagtccaccactgaatcgccgacagccgtccctctccacttccgccgtcccccaacttccccaggcctctcgcgcgcagtccccgttgaacaaccctcccccaccgcctccccaggctccccaagccagcaacgcaaccgccggcctgcatcggtcgagtttcgaaactcgcgcgagatacgccctctatggctcgtcgagcgccacagtttgatcaagggtgagcctgagactgaggagcccttgccatcgctcccatctagcaagacctcctcccgagccccgtcagtagaggacctaaaatcccttcgcgaagatgacggccttaagagctgggagcatgtagatctgagccactcaatcatggagaatcagcggccgactggtctgatgatttcaaccgaccaaaccaacgagagtcatgatagagaccttgatctcctcggctcgcagcaggccacgcctactgctgaacacttccagcacgcggagcctaggaaggaaaggcccagatacgagttccactccccctctgagctcctgcgggaccccgctgttctggacgagttgcctccgtcacctacactggacatcctgccttcagtagagggctcccttgttggtgttgcctttagggagcaagaaacgcagcgtgcgcttgatgctcttgagggcgtatctcgccctcagcctgaggcggaaaccccggcccaagaacatgattcgtccttcagtagcgctgcagatttcgccaagggcgctggctctgccggtgttgtcgatgcagctgccgttgccgttgccgttgccagggagcatgacgagtctcgctccttgcctgcagatgaacccactaagacacatgacttcggcgatattgtcgatgcagcggttgccgctgacagttcctctgacgaccatggcaaggcccttatcagcgaggagacgctcattgagcccgtccctgccaccgaagagaatcactccgctgacaatgagtccgtgcaaccgggtatggaggcagccaaggaagtcgatcctgaatcgactgaacaccttcttcagtcttccaatcttcaaactcaaccagagactgaaatggcccccgataagaatgtggctactcaatctcctaagaagagaaacaagaagaagaagggcaagaagaatcaggcccaagatgcggatctggtagcctccgaggaaccggccgatcaagagaatttatccaagaagttggtgcaggaccctgctgaagtgcctgtgcctgaagctattactgctgagcctaagcttgctgtcactgagcaatccgagactgagtatgttgaggtaccccacgagcctaggcctgagcttcaggttgatgagcctgcagtcgaagctgctcctgttgagttagcccctgtccagactgctcctaacctcgagattgcgattcctaagcaatacgaggctgagcttgccgaggtatcccgcgaactcaagcccgcgcttgaggttgatgagcctgtggtcgaagctactcttgagtctgcggccgtcgagaaggattctgttaagtccgatgttgctattcctgagcaacctggggctgagcctatggttgaagctactcctcttgagtccgttgcggccgagagtgctcctgttaagcacgatgttactattcccgaggaagctgaggctgagcctatcaaggcctctcgagagcttgaaattgagcctttggtgacaacgcctgaagttggcacggctcctgaatccgaggctacccaggacaccgcatcatcgactaaaaaggctaagcgtgacaagaagaagcagaagaagaaatcaaaaagtgcgtctacttctgacgagcctgcaggtgatactgtccttgctcggccccaggatgttacctctgcctccaagcagagtgagggcgagcagcaagacatcggtcttgccgccgaagagattcaagcaccgcctttgcccgaggatattgctccttccactgagaacacctctgacccgactgtgatcaagtctgctaccactgatgaagagcaagttcgaagccagcaggaatccggagagctggttcagcctgtggaacatgtgcccagcgaggaatctgttctacctgtttccgaagatcccagtttgcccatcgagaaagagcagaccccggagcctgattttactgacgctaaagaaagctcaattgccggtgcccctcaaccagaagtggaggaaatatcccgcaacctggaagagattgataacccatctactccagaggccccagtcgatagcaccacgcctgaaatcccccaaacacccaaagaagacaccgaaggcgaagacaacttcgaagaggccgttgaagaacatactccacagctcgccgaggaaaaggagcctgcaacggaacctcgcatcgacgtggctgcacatgaccctgtagacgcatcagaaacaaaggcagagaagcggaaaaacaagaaaaaaaagaatcgcaaatccgctgctgtcgaagaaactcgcgagactgaatcccagctagaaatccaagagcttgaacctgagcaatcagctggtgccgatcctgcggatacccgatcccctccaattagcggtgaagccttaccttctgatcctgaacatcttgaacagcccttcgaaaccaccattgaggagcctgcagctgcccaagagcagaagcaagttccattggaggccactgtggatgtaacacctgttgcaaccgaggcagtgggccccttggagccacctgatgaactgtcacagccaattgccattgaggttcagcctagcgccgaaaacctggatcctgctgaggggggtcctgacgaaatctcacagccttctactgttgagactcaacccgaaaccgaagttcaagtcgagcccgaagtcgccttgactacggcccaaaagaagaagggcaaaaagaataagaagaagggcaagcagagtgaatccatcattcctgacgacgagaagcctgctgaatctacctcgccggtacctgagattgaggctgccactgaggatatagccaagaaagctcctcttgtcatagaaggcgcactgttggatgcgcctccccaggagagcgagatagagctgcccatcaagttcgaacaatcgcttggggccgagccacttcccgaggctgagctactttccgaggttatgccgccccaggaagaagcttcttttgacccccttccgcaaccagcgatacaggcgacagaggcagagatgcctaaagaagaacccatcgcacccgaggagcagcccaaagccgaagaatctcctgctgagccagaggctcctatgaccgctgcggagagaagaaaagccaaaaaggcgaaaaagaaacagcaaaaggagcaggaagagagcattggttccattgtgaagcccgttgatgctgttcctgcgttcgatgccgaacccgctgatccaagcaaggatattgctccaactgcagaaattgatgacgctgttccagccgacttctctggaccggtttcttccgagcatgctcaggctgaacaggaggttgcgcctatacttacagaacccgaggcagctccactcaccgatgatattcttctgcccggcgataccgagactaacgaggcaatgagagacatcgagccccccgctgaggctaagccctcgatagaagacactgccccgtcgtttgagattgagcccgccgaagctcccgctaatgttccatttgtaccggaagaagccaccgctcccgtcgatatgcgccaagattatgaacagcaagacgatgttgtcaaggcagaggagctgaagagcgaggatgtgactctagcgcccaccgaagaggcctcggcaaattctccagagaccgatgcccccaagacacatgaaaagtctcctgaaatcgaggtcccaatgactgctgccgagaggaagaaggccaagaaaaacaagaagaagcagcaaaagcaagagtctgtgcagcttgaagagaagcctacgcctgagaataagcctacttctaccgaggagaagagtggcgaacaatttggcgacattttgcctgatcgtgaggccacaactactgctgaagccgttgcaggccttgatgagcctacagaacccgaggcagcccgtgaccttgaagctgagaccaagcctgaagaggaacaagctccggatgtgccaatcctcgattgcgaacttgctcccgagacacccgcagacaagattattcctataccggagattgctgaactagctattgatcttcgaaatgacgacaaagaaagcggcctagagcctatagttgaggtccccgctcccatggaagacccacagaaagagcaaaagcttgattcggccgtcggcgaggagcctgttttagacaagtctctcgaagacgagcccacagagtctccaccagagcctgttgtggaggagattcagtctacggaatccacagaaaatccagtggtggaggaggctgaaggtgaacagacggcatcttcttctaagtcgaagaagaagaataagaagaagcgccaatcagttgccgctgaggaagagcagcctgtacccgccgacgaagagtctagggctgcccctgccgaagaaaagaataacctcgcatccctggaagaggcgcctatacctatgctagccgagagtgaatccagcgagctcgcgctatctaaagagcttgaacagccttcacacgatagagacacggagcctgttattgtggtcgaagagccctctccagaagaaaccacgcagctagaggctgctacggatgtagccgccaccgaggccgctgcagaggccttaatgacccctgctcagaagcgcaaggctaagaaagataagaaaaagcggcaatcagttgccgctcaagagcagcagcctataccgaccgaggacgagtccaaggctgttcccactgaggaagaggttcaaattatacccaccgaagaggaacctacacctgtgcctactgagtgcaaatctaccgaacccatatcatctcaggagcctgggcagacttctcccaataaagatacagagtgtcccattttgacggaagaggcgcctaaggccgaagagccctcctcggaagtcacagcacaggcagagaccccttccaccggcattgagaccgctgaagagtcatcaatgcctcctgctcagcagctgaagggtaataaagacacgaaaaaccgacaatcagtaaccactcaagagcagcagcctataccgaccgaggacgaggttaacattatacctaccaaagaggaacctacacctgtgcctactgagtgtaaatctaccgaacctatatcatctcaggagcctgagcagacttctcaagatacagagtgtcctattgtgacggaagaggcgcataaggccgaagagccgtcctcggaagtcactgcgcaggaagaggtcccttccgatgcagccggccctgagaccgctgaagaggcatcaatgactcctgctcagaagcggaaggccaagaaagataagaaaaggcaccaactagttcttgccgaagaggaacagtccgtgcctgttgaggggtttaggtctgaaccagtcgagaaagaggtcacacctacgccagccgacgagaagcccccttctgaactggctcaggcagagctcactgaccctatgccgactcagggaaccgaacaacttgcggggacttctattatggcagaagaaacgcctgaggccgaagatccctctgttgaagaggtcgcgcagcaggatctccctacccatgcagccgccaccgaggcctctgaagaggcatcaatgactcctgctcaaaagaagaaggcgaagaaagataagaaaaagcgccgatccgttgtcgccgaagaggaacagcatatacctgctgaggtgcccaagcttgaatccgctcaggaagagcccactgtcgacaaagatgcgcaggctcttgttatgacagaagacgcgcctaaggacgaagaaccccccatcaaagacgtcacgcagcaggatacccctgctgagggaggtgctaccgagggcactgcggaggagacaatgacccccgcacagaaaaagaaggccaagaaagacaagaaaaaacaacgcaagtctgttgcttttgacgaggatgctactccgatcgaaggacccaagccaggtcaagatttatctacactcgaagacaaggttgaacctcaggatgctccggctgacttggttgtctctggagaatcagacaaggagttgccagtggccgaagaaaccaccaagtctgctgctaaaggggaaatttcagagatgatagaagaacccgcttcctctgaacaaagcaaagagatcaccgaccatgaactagtctcaactgctgcgcccgacaccccggtttctactgaaatcgagttgccagagcaggcggaacaatatgctcagcctccctcggagcccaagtcacctagtgcacaagagcccgaagttgccttgactacggcgcaaaagaagaaggcgaagaagaataagaagaagggcaagtctgtggacttagctgacaacgcccctgctgccacagacgcagcgcaggaatctgatcctaaatccgagcttattgttcaaacttccatcgatattccggctgcgaccccggatttgcaagataacccagcctctgagccagtacagctcgcagagggtctagagagtgaagataccattgacgccgaggctcccaaggccgaggaagtcgagccaacagaagccgtatcagacgctttgtcgaaagaggaaaccgctggcgtcaaggagaccgacaacgagcctccggggactgaagcaattgtcgatgctgaggcaactccctccgaagaactagaggccggtgcccattcttctgcggacctgaacgaagaagctggtatgtcagccaaggagcgacgcaaagctgccaagaaagcaaagaaacgccagtccaagaatgtcgacaccgataaagacgttgcaacatccgattcgccttttgccccgggaaccgagcctgctacacccattgaagcgaccaacagcgtcgaaaaagtcctcacttctacggacacagacgtccctggactttcagccatatcggcaccctcgcctgcgcaacatgacggtaaagaacatcagtcccacgacttaaaaacttacgacgccacggcgcaagatacggcctcgactgataaatacgtgtcttcgcaggtagagcagacgccgacagagagtccttttttagattatcctccccaacccgtgcttgagcgttcagttgattccggcgagttggtggagggaaatgatcagcagaagcgcgatgttgcccttgctgcacatgaacgggaggaggagatggttgagcctgcatctcttgaggaaatgaaggaagtgaatgatggtgagaatgttgaggagaaatcgtctatgccggaatcaggtgatatctcaatgaagaaagaaattgaagagacgtctgttgatgtgcccattgatgctgtccctgaggagacacaagagtctcgtgtgggggtggcttctaagacagctggctcgaagaagcagaaaaagaagaaaaacaagcaagaagagggaattgcagcttctgagcgcgagacctatattacagacgacagggagcagcttgaagctgcgcctttggttgagggcgagcatcagccggcaataaaggaaatcactgagcctgagcctattgccgaggccgaactagtgctattcccagagaagcaaccgggagatcactcacatgacatcgaagagattgtcgctggccagaaaaccgaggacgttgatgaaaccaaggatattagcattccacaagtcgagggcgttgctcctcccagtgaagcggccacgcagccagaggccgatgcagtcgccgagtccgctgaagaggcgccaatgactcctgctcagaagcgcaaggctaagaaggacaagaagaagcaacgccaatcaatccttgctcaagaatccgaacctgggccccaggctgaagaacagacagcatctgaggcggctggaacttctctccaagaggctgaggttgcaacggagtgggcacctgccgaagttatcacgcaagatgaggcttctactagcccagataagcctacagtgcagcctattgatgtccccgaggaggccaccaagaatcttgtaacgccttctcaacatactggaccgcatgttccaagccaagaaatcgaaggtggagatagctctttcgatctctcttccaccgagccgaaggtcgaggagggagacaagtcgcctgaggaagcttctggaaccccggcggacgagcaacctagcgcacaaacgccgcctgaacctgcccctgagcccgacggggaatcggcaactatcgctaagaataacagcaaaaaagagcagaagaaggccacggccgctgctactactgctgccatcaccgccacccctttcgagaaagaatacccacaatatcccgaggagccctcgacgatcacgcctgaagctctggagttggtggcagagcagcctatcgtccaagggcagcagccttcagagactgaggacaagcctcggtctgatgcagaaaagagcctagacgaaacaacagaattcacaacttttgagccgaaagaagatgttttgaagcagcctgttgatgctctcgattctgttaaatctctcgaatccgaggtaaggccggagcagtctacaaaagagccagcccaagaatcagccgccatcaatactattactaggaaaatgtcaaagaaggacaagaaaaatgccaagaagaaagccacacaagaagtaattgagccggctgtttctcctaccaaagatcatgttcctgccgccacgactgcaactgcagaagctgctcctgaaccagaggtgacttttgaggagacctcagcggaggttgttcctgccatcgagtctgcaactaccgaggctgatgttgaatcggaggcgacacttgaaaaaaacccaactttttctgagcatgagtccatttccccggaagaaacccaggtggctccgaatcacgagcctgaaaacaccgcaacgacggctcttagggactttagcatcgtatcagataacaagcaactttcagaaagcaagaaagatgaactcgtcttacccatccaacccactgacccagataccaacaatgagccccttcatctcgaggatcctgctgagaagaacgaccaagattatgaagcacacgttgggactgatgcagaccttgagaaaagagctgatctcgaagtcgtcgaggatcagcctggagaatacgaagtgatgtcgcctctgtccaagaaggtgtcaaagaaggataagcggaaggccaagaagatcgccggcatcaccgaagaagtttcgactcaacaacgggaagagcctcaggttgatgtggctgagttacccacggaatctgagatacagccgacagagcctgttgtggaaccggatacttccaaggaactggaacatgttgcagaacctcaccctgcattggagcaagggccgtcaactgaggctcccctactaattgaggatcagcctgtatccgggtctgaagttcaggttgagcctatgcaacccgatgaagaggccgtcgttagcgaggaacttcctctgtcacgtaaggccttgaagaaaaaggcaaagaaggcccaaaagtccaaaaagtccctggacactgagccaccggctaaaattccgattgaagcagatcaacatgccaccattgtgccgtttgaagataagaaccaggacacagaagcgcctggtgaaaagtcggctaatgacgaagactggccgtcgattgactggcaagcaaaatttgaagagtcccagcgatcaagggaagaggagcctgaacctgagccggacattcgaccttcagaggctgagattataggagaatatgttgatccttcattccccgaagtttcgcgagatgcaaacgaagctgcggaggaagataattgggctttgccggcgagcaaaaaagacgagctgcagtcacaccaagctgcttcggaagcccaggaggcttcactgggtccctttaacgacaaagagattgaacctcctattcgaacaactactccaggtggatctaagattgccaacttatttcccgacctcgagcgtgcgggattccgacgatcagctttggaccagcaaacaccgtcgctaaaagatagtgctgaggaagagacaagagcggacttggaagcgaatcgcgatatcgcgatccctgtctctgaagcacccctagcgaccactgaaaccaaaagaattggcgatgatttcgcctctgacctgcctagcagtctcgaaagacaaattgagtctacaatctcagagttgaaagctcaatccgaaagtcctgctgccacggaggatgaatcaatcagggggcctgaacttccgacgcatcgcgaaaattccttagatgcgtcattgccattgtcaatggaaccctccagtgaccggaatcgtaccgaggaaccttcttctcctacgcgccttccgcctggggcggaagccggagaggaactgtgtgagccacgccgatcaccatcaatccatggacggcaccagcatacacccaaaacatggagtttggaagaaccgtctctacaagctctccgtcccccttcccctcctcggtcgctcttcggaggaccgactgacgattatgtgcgaccccggactccgcttgatacaattgcggaacaagaaccacgggatggccagggagcgtccatggctcatcgcgggacgccccgcctggagatgaagcccgagcatgtcttacctcggcctcagacacccgtccggaagtttacagacaatgcctttgatcgagaggcttggcctacagaaaaccaaaagggcgggggttcaaaccccgatattccaaaaacgcctgagcaagggatatcaattctgaaacccagcaccagcagcggtaaattacgtcgtacaaatcgcagtgttagtggcgatctgcgggcggctagtcgagcgctagattcccagccttcgaatctcgatctcgatcaggtcccgtcttcctcctcttacgaccccgtcaccgacaagggcaaacgtcccctgcgaagtatgtcggatgtctatgtaagttattaatttatcccttattttcatttgcgattgcgattgagattgcagttgcgttgtcttgtcttgtcttggtttactaacttctccaggagggatggggtgagacgcccaactccccacggtcgcccagccgaccgcctagtgtccgtcgccgtcgcagcatgcaacatttgcaagacatcgaaacccgcctcgaccagctcatctctgaaaatcgtctactgatcgctgctcgcgatgaagctgaagataagcttcggaataccagcgtcgctcgtcgaaagagcgaccgtgcccttaacacccgcgacggcgatctgcgcgatcgggaatcggaggtggaacaattgaagaactcggtggaatggctgcagaaggagatgactcgtctgacccaagagaacgagggactgacggcatccaactctgcgctcgccgccgcccacgcagccgaggtcaacaccctacgcgagtcgtccatgcgcgaccttgccgacttacagttgcgacacactcaactctcgtcccagatggaggatcgagttcgacaagagatcgagtcggctcttgcacaaaaagatgttgaattgcgccgtctgcgcaccgaacttgaggtggcccgcgataaggtgaaggagctccaacaacaaatcgcagcctcggtacatgacaatgcccttgtcttccgggatgaagagtacttcgatgctgcctgccagaagctgtgtggccatgtccaatcttgggtcgtgcgcttctctaagcacaatgataagcgtcgctgccgcttacttagtgagttgcaggacgaaaagatcgcagaccgttttgacaacgccctcctcgacggcttcgatcccgatgcctacctatctgatcgtgtccgccgccgtgatgtctttatgtcggtggtcatgacgatggtttgggaatacatcttcacccgctaccttttcggcatggaccgggagcaacgtcaaaagctcaagtctcttgagaaacaattgggcgaggttggtccaactcgtgctgtgcatcgctggcgagctaccactctcacactgctatcccggcgaccggcctttgctgcgcaacgtgaaagtgacacggaggctgttactctggaaatcttccaaaccctatcgcaggtcctccctccgccgtctcatgttgaatcccagctcctggataacctccgcaagatcatgcgggtagcagtcaacctttccttggaaatgcgtacccagctggctgaattcattatgctaccgcctctgcagcctgaatatgatacaaatggcgatcttgcacgccaagtgtacttcaacgcagccctgatgaacgagcgcagcggtctgacgaacgacaacagcgagctcgaagcccaacagtccattgtgcgcatcgtgctcttccctctcgttgtcaaaaagggcaatgatgtaggcgagggtgatgacgaagtcgtcgtctgccctgcccaggtcctcattgcccgccctagcaaagacaagaaagtatcaaagatgatgagcggtgaccgcatgtccatcgatgcttccaagtcggtccacagcattgttcaaagtgttactcacagtgtggcaccgtcatctatgatggacatgagtaatgtgatctgaggcgtcacactccgatcatgattgctcccatcttaacatgcgtgcttgctgcatccttgctcttattgtctaatgatttttcttctcttctctcgtcaatgggtgatatggcgtccaggtcatctaacgtaacggtcattccaaggccaatgaccatgaatatgtggagtctttatgttcattttcattttcattttcctgttttctatttgattttctcatttgttctttcgaagacaatgtgccagcccgatgtgtattatcatggctttgatgtcttatgagtgatgacctgtacttctggtatggcagtgtaataatctatttcatactttattctttattctttccacttatctgtcttttacagtttatttcttggccctcggctagaattgtaagacttctctttttataagaatcaaattgggttgtccctcaagagcttctcgggtacagctccggatattacaccagctacctcttcaaggtaatctttttgaactcagcagtggtgtccctgatggctacttcaacaggaagtcgctccattgaactggccccatagaagccatgcaaaccctgcaccctgtctaatacgaatttcgcatcccctggagcagcaataggcccaccgtgacacagcacaatgatatctttattgatcctcaccgctgcatcccgcattgcctggatctccacaacacattgttccaacgtctttccagtcttcgccccaatcaggccagaagtagtcagacccatatgtgccaccaggatatccgccccggccttcgtcatagcctcggcatcctcgacgttgaaagcatatggcgtcgtcagaatatccaattcagctgcctgccgcaccatctccacctctttacaataccccatcccggtctcctccaagttggcccggaagttgccatcgactagtcccaccgtggggaagttctgcaccccggcaaatcccaattcccgcagttgcttcagaaaccgcgggatatccttgaatgggtccgtaccgcaaacacccgcaatcacgggaatattctgaacgatagagatgacttcggcggccatttcaaccactacctcgttggcgttgctgtacggcattagtcccgcgagacttccgcaccccgccatgcggaagcgaccgctattgtatatgatgactaggtctgcgcctccggcctcgaccgattttgcggaaagaccgatgccttatggtggattatcagtcaaactgatagacagaggcaaccgaaagggacaggtgacgtcaagtacataccggctccggctccaacaatgggtttcccgtcttcaatttgacggcgtagatgggcgaggatttcgctacgggaggtaggtggcgccatagtaagaaaatggaggtttggaggtttgtagtttgatcaattgttcatacagatcaaaatgggagggatcttcccaattatatgattcatcgtggggcggacttaatggagcgcggatgcggacgagatacacaaagcgcggagaccgcggacataagcgtagggatcactctctcattactgacagcaaatcattgagaaatggattctcaaacgccccagattaaggccaatgagtccgtcaatacattaaataatagaagatgaataagctatcatcctacaaccccatgcatataggagacgaggactaatttacttggactgccagtcaacatataagaagtccatcatatgatgtcatatattaattttatgcactttctatttcaatagataccaatcggcaaggatcaagatatacttcccatcgcattcataatcagatcccactgatcccaatccatgtccattggattaatccattgctgtggctcgatttgacgaaccagaccgggaaagccgacattctccaaggtgaatgcgtggccattactaaggtccgcgggctggctgatgggattcatctgtctatttgaattggggccctgtgagacagaattcggcaatccatccggtaccagggccgaggtagtcatccacttgctagatctagagagttgtccgtcagttctcattaagacgtatgtcacgcgcgctaggcaacttacagtatctggccgagaatcgttgctgtccgggtgcacagctgactttgcgcctttgacgcctcgagtcgagcatggcattcgtgaagcagtcgcacctcgttcaatgtacatggtttttggggctctatagaaagggcaagcaccaagacgaacgcggcgtggaaagcgtggaaagcgcctcggccacggatgtaccagtagaagggcatgaactggggcagtccgtggaagtctgcatgtagttctaagacgcgctgtgcacttttcaggcagcgatgctttgaccagctatgttgcggtagacaaacggtttcttcattcagtatattactgtggagaatgaggactaggtgatgggaaaaactgagcagcagatttgtatgaacaactgatgagctgtccccaagcatcgaggcgtaactctgctctagtgggtctaaatcggcttggatggccgcgtccaggcgttggagggttgtcggatcgtccggccgtgcagccagaacaggattacagatctcggaggatatctgaaaaaggcgcgattttcgaaccagatatgagacaggtttgatacctactgaggttgcaatgggtgctggttgtccctgtacgatgtcctcatcccacacctcagctgtgggcagaacacgcgacgagaacactgactggtatatatcaagtcctgtgatggccagattttggttacagagcagcatggtcaggcctagccaacagcggcgacgctcttcggtttcgacgatatccagggaaaacgtggccgggtcaacgtgacaaccgatcgacagcgccagatgatgaaccaaacccagaagagtccatgtttggccatgactatggtggatcccatatataaggttcagtagcgcctgtagtgttgagatgttgtgtcgccagagatagcgatctgcttcgaggcatttcatcgccgcggtgtaataccgctctgagagttccgtgactcgatcccaaggggtatgtttgcggctgagagtcttaagcaggaggctgtcattttccagtgcgagaacagccgtgcctaagatagtaaataggagagcaagccatgctagggagacctgatctggatccttggaaaattgatgataccgttcgtgaaacgtagggctatgtaagataggaaagagcttttctatgttaattttcagtcaacctgatgatagcggtagataggaaacctacgggcgcaatcgaatgaaaatatagatcctttaactggttgcaatactccgtcggtgggagttttgccaagagattaggtctgttttcagcatcgtgttcaccaaaaggatatggaccgctgggcgtgtcaatcatggcgctctcctggcttagaaatgggctctcttgagttgctcgactgaaaacacgccggccagaggtaaaggggaggaatcggacgtgtcctgaagtggatgggatgagagtgcccgttgtaaacgttgtcactggtcctaatctccgggtctcttgtacctctgaatccaattgaggaaaattgagcgaagatggtgttgtatctggctgttggttctttgcatgcaacagctgctctagcttttctatccgagctaccagatccgcatctggttctccggcgagaccttgataatgtggttggagagtggtctcaggggatgatgagcgattttccagtgggcgagcttgtggctgagactgctgcggctggcgctgtgagggttttctcctggtactatagacacattgctctagaggaacacggcgtcgtatacaagtgccgcaagcggggccatttcggggacatcggatcttgcgaacacggcacggctcacaagaaatcggaagacgctggcgtgggtggtgcgcggacatagtgatacgcactaatatatagccaaggatatgtaatatgctcgcggcttggctggacgaggtcgcagtcgaaggcggacatatacggagaaggcgggattgagttccactttgttttctccgcgctttgccaccaaatgatgctacaatgtgaggacctaaacacgcatctgtcagtgttaagttaaagcctagacatagtcaggtcattcaataaattccctataatcttccaccagctcattcaccatgccacgtatcatccttctggggacccttgacaccaagcgtgcagaaattctatatatctacaaccagctacagcatattgccacccgcttctcgacgcctctagagattaccttgattgactgtggccgtcaagccattaacgacgatgccatcaccataagtcacaccgacctgatatccaagtatgcatccggcgacagcaccgatctattgacccagccccggggacaagtgattgaactcctcatcagctgcgtcagtaagtgtgtcaccgaattactgcgaactacggaggttcacggaatcattggtgctgggggtagtggaggaaccagtctgatcgccgccgtaatgaggaacgctgcacctcttggccttcccaaacttgtcgtcagcacagtcgcgtccggggatacaggaccgatggtaggcgagtgcgatatcacattgatgtactcgatcgtggacatcgcgggcacaaatcggctcctccgtgaagtgctggggaatgcggctggcgccatttttggcatggcatccacatatcaacataggctggatgaacgccggacccgaagtctgcaggataaacagcgagaagagaagaaaactcgagtcggtattaccatgttcggggtgaccaccccgtgtgtggatcgtgtgagacgtcacttggaagagaactattctgtagaggtctacgtttttcatgcgactggccatgggggaaaggctatggaacgattggtggaggacggctgtctagacgccatcttggacatcacaacgacggagatctgcgacctcattgccggtgggactatgagctgcgaaaccagccgcctagagatgacactgaagcgcggaatacccaatatcatttccattggagccacggatatggtcaattttggtccagtcgacactgtgccacgccaataccgtgatcgcaagttgctagtccataatccgagtgtgaccctgatgcgaacctctgcagccgaatgtcgggaagtcggggatttccttctcgacaaactaaaccggtttgcccaggaccaaagtatggttgaggtgtggcttcctaggggaggagtgagtatcattgggacggtagggtcggaatttgccgatgccgacgctgatgccgcccttgctgacactctacgctccgggctaaagggcagcaaaatccgagtggtatcggatgagcgagatataaatgacgatggatttgcactagacattgcggatcggcttatggctctcgtggcgaagcattcttgcagtgtcatagcgagctagacaagtctgtcgttagttatcagacaagcagtgtatgcagtggctaggaatttgaatttatctatcgattgctagctcgacaccgacatgatccgtccaactttcacctgcgaaagcctaggctgctgtcaaagtcttgtataagacctgttgttcagctgattcaagactaggtgaagtatgaagaacctcaatttcaaccttgtgcttgttcctttgcctttgcctttgatctcattctatactaagttgtacggagtagttaactacaggcaattggattttatagttgtgctgacctcatccaccctgttttaggaaaagcctcctgggctgtcccatggaattcaaacagccagagtctcatctgcagccttggagggacctcggtatttctctttgtattggattctttcttttttcttgttgtacactttagaaaaaaactggactcgttcccacttcctatttaaatccgaattcaagactttcttgtccttgttttcttccaggaatgttccactctggctttgccacccgcgtcatcccccaaacctgagctgcagcgctgtcgaccatgccgatgtcgatttccccatgatcatccgcgctagtaagatcgtatggaaagctgggtatcggtatcctacatgctgcgagtcttagcactgtttgcgttggcctagctccattggttgatgggtgggctgctgaaaaattaacctccgcttcagtgcagttgctctgtaccggagatatccaacatcaatcgcaacccaattattggcgctgtcacaatggctccgcccatgatcccaacacctggcatagcggcctcccgaccgcctcgttcctcgcattcgtctagccgtccacagcacagcgattatccacccgacgctgataacaacgctagctatggcccaatgggcggcggtcgggctccagggactagtagtccggtacccgtctcggagaccacgccagccaacaatacccgcttcatcccccccgctgattatgctgctggcaaaccctccaagtcctccaagcgcaaaaagaaccgcaatcgcaaacgtcgcaatcgacaccagtcttttattccacctagccgggaggaatctcatgatattcctggggagacttcggatgctggaggtgttagagattcaatggaggccgaccggccaacctcgagggacaagtcgttcttcaaattgggacgcaatctgagtaacacaagcttggagagcgatgcgttgttagaccatcggtaaaatctcgtgatattgagcgatctcggagcttgagatagatactaatttttctttccgaacagggaccaacctttgatgcgacctcgtcgtgacagtcgcgttgcatcgtcattccggccgagctccctaacatccaatgtcttccgatcgaacgatgggcaatctcgcagcaccccgaggggaggacggggccaacaacatcacaatggtgatagtgacgaagaggatgccaatgatcggaccccattgatgcggccagtttccagtcacacgcccggcaataattggtatggaacggacaatcgcccgaatttgttctcctcacgtgctcgacagtactctactcggactatgtcctccggctgttcaccaaaggatgatcgcagcccactctattctcccactgtggagcgagactacgatgtcaacaacccgccgtccattcccgggtccccaaagctgggcccggagatgaattatgacgatgccgtggtaacaggagctgattgggacttctcgttagctcggacaatggagaatcaccgggagtctatgaacgccttgaacgacacgctgatcgacatagacgggaatggattgcactcacattctgcgccatcttcttcgcctgggtcgccgcttctctctcctcaccaagaattacggcggcgccggaccgtgacattaccagcacaggaagatgtatgcttccccaccgaaacgatatccgaattgggagacgagggagcgagacaaattcctgatgaagccggcgaacgtcgacggcgtagacaccggcgatggcccgatctctccgccctggaagaatggagccgtgaggaaaaagaggagcgcaatggagacaatcgagtcaaaaggatcagtgagcctatgctcatcgcaggccgattgcgccctcagtatacaggatggcgacgtgaagaggatgaggcgccttatcggttcacatatttcaacgaggaatttccgagcaccattcatgctcaaaccatctctgagctggtacagccaggtggtagcttccgcgatttgtttattccagatcctcccgaattggaagattcgtctgaagacgaggactcggaagaggaatcttttatggagcatgcagctctcaatcactcaaccaatcccgccaacaagccaatatatcacacagacaatcaaagtcaaggccaaggccatcaaacgagcgttaatccttgtatgacacctcagaccgttgttcccaacggaagaactgcaaatgaccctatgactggcaatgctcctccggtcagaggaccctcgcgtttatctgtcatcagcgaaggacacccagactcccaccgtgagctctcgcccgcaccttccaacaccccttttagcaaaacccccaatccgaaacctaaacgctacggtccacggccgactttctggctagatgtcctctccccgacagatgcagagatgcgtacgattgccaaagcttttgggattcacgcattgacgacagaggacattatgatgcaggaagctcgagagaaagtcgagttatttcgcagctactatttcgtcaactaccgtacttttgagcaggataccaacagcgaggactatctcgagccagtgaacatgtatgtggtggttttccgcgaaggcgtgatctccttccatttttcgcaaacacctcacccagccaatgttcggcggcgtatccgccaactgatggattacctgatcctcagctcagactggatttcatacgcactgattgatgacattaccgatgtcttcggtccgctgattcaagcgattgaaaatgaggtcgatgagatcgacgagatgatcatgaaaatgcactctgccagcaaggaggtgtcgtccaatgacagtgtgcttccttcattcgcaccaggagatatgctgcggcgagtgggagaatgccgcaagaaggtcatgggactgtaccgacttctcagcaacaaggccgatgtagtcaagggcttttccaagcgttgcaatgagcagtgggaggttgcccccaagtcggagattggcctgtacctcggtgacattcaggatcacatcatgacgatgactggtaacctaacgcactacgaaacgtaagtttcttacctatatttaaggctggtctatccaaacgttgaagtcgctgactgtgtcgtccagaatcctttcccgtgcacactccaattatttggcgcagatcaacatcctcatgaacgagcgtcaggaacatactgccgatgtcctgggtaagctgactgttcttggtacgattgtcctaccgatgaacatcatctgcggcatgtgggggatgaacgtgaaggtaccaggtcaggaaatcgatagccttacatggttctggtgcagtatgtatttccttttctttgccagatgatttgctaatacttcatagttaccgccggactatgcgtatttgcatttgtatctgtttggactgctaaaagagtctacaaaattgtatagacgtacaatgtgtccccatgttagtttctacatttcagtcgattggatcgataccctatattttggtttggttatttgcttgttgattttggggaccggggggggggggttgtttctttcttcttggtctcgggctcgggctcgggctctgagtaatcggcgtgttttttgttttgtgttgtggggggcggggggggggggttgtttctttcttcttggtctcgggctcgggctcgggctctgagtaatcggcgtgtcggttcttggatttgatatacgatgcatgtgttgctctttgctacatttgggaggttctcagatatacataggatgaacgtaactgtatattacttggaattgttccctcggacgactataggttatccctttttggtagcgtttaggattcattgtctttttggtaggaacaaagataataaggaacccctcgaagcgaccctatatatagacaagctgaataacaggcaactgttcgactccaaagaaacaaaaacagtttcatcttcactgttgtagtgaagattgtacacccaaaggcgaggctgtagcatgatcaagccattgtatttcccttacatgagtaattaattattccctgcacgctgcacgttttatttccattaattaccattaattaccatttattacaattcccggcgtcacccactggtcatcaacctcgagaatacaaaaccccagtgacttcatctcttggtttctgttcgattcatcctcgttccctatttcacctttcaatcctccctctcttctctgcttttcaatcacattcactctctttcccgagattcttctactggattctagactatccgtgtgcttccctgcagtgacccctcccttcttgacgtggaccacgatcattggcctttgccacaaacctgaccctctctgtcagccacttttcaccgaggttttggtcaccgacttctcttgcacatttggcagcccagccgccacgccagaacgcgtaaaaccagtcaagccaaaacgttgagccggatcggcgggtcacttttcgccctaaatccgccaaccagatcttgtcatcttcaattccttcgttctaggccttccttttacccttcccggcaacaaagcaaaacagcacaagtgatgtgtgtgctctttgcgctaccctgacccccggcccacttgctattctaaacaatatccatcacccctgcacctgctgcagcctttttttcgcttgtgcgtttctgtacagaacccaatttctggcaacagcatgtggtcatcggctattcgttctgctggaccctcacatgtgtaaagacccatattctgtgcaacatcttattcaaccctcgtgatatctcattcgcccttaccagcaacaactcaacctcttcgccgtcgagctttccctgcccgcgtgccgtgccttgctttttctgcttacccgagccctgtctctgcccaactgtctggctacctctcgggtctcctgacttgtctacgttgtgtcggcccattctgacgcgacaaggactatggctgcggagtccgagaggccgcctcaccctnnnnnnnnnnnnnnnnnnnnnnnnnnnnnnnnnnnnnnnnnnnnnnnnnnnnnnnnnnnnnnnnnnnnnnnnnnnnnnnnnnnnnnnnnnnnnnnnnnncggggggggcgggggggccgcctcaccttaacggcagctctggtctatccagaggcccgaaggatgcagagccggcgtcagaccctgtgcatcgatcggccagtgaaggtggcatgatggaacggtccatcgtcacatcccaggctcaacccatgtctcaggtgcccacgcttttttccaatcctacccctttcgctcccacgtctaccaccaactccgctgcttcctcccgcgaaccctccccggtccgacgctcctcacgtacctacaatccttcctcgcccagccgggtatcttcacactcgcgaaagaccagtcaagaccagtcaagtccgacccgacactctaacggtttaatatctggcccacctacaaactcatcaaccccgaatcttcaacgttcatcctcttctcctgtcagatcccttgttctctcggctcctaccgactcgccagccaatgttcctggtccggataagtccaatatgccatcatgggccgcgaaccgtcgcacagatctggattcgacccttccgaatacttcgcacaaacgatcttcattgccattggaggatttcacacccaagcaggaccgaaacacaacccggactgtggctagaggcgtcagtgggcaagggtcctcactagaaaccgtcgaggagatggcaagcaatccctctaccccatctagtgagacttctatcaagcctgtaatcgcggaggagtcacgattgcaccggatcgatgaagacccaactccacctgctccgcatcaaactttgggcagtggcagtgacagtggtgagaatcgaagttcggaaccgaaggaggaggctcgtccacaggcgtctggtgcggccaaaacacccaaaactctcatgtcacagcgatcaacaacatcactcagtgctggtgctcgcggaaagcctgccgacggctcagttcgcaacatgattgtggagacagagaccgttagttcgataccgcaggtctcaatgggagtgggaaatggtgagcgaggcagtgcctcgcgtgcagaccagggtacacttcgcatgaaaccttccaatgagacgattcgtccgcgcaaagaaaagaaaaagatccgtcgacccaatagcctccttacgactggccccgtaacaagcaaagcagacattttcgaggctcgagtagccaatgcagtggatgaggctgatgtttcggactccgacgagaccttcgtttacgactcaaacccgcctgatccgtatccttcgcgaccaccccggtatcactctcgaactcctagtgcgacctctatggcgagtcaagcggaccagttgggtagtcgtacccgagggttgcgagatgcttctcacggcgtgacaggcaaacgcagcatgaaatttaccaacgccaatccctacaacaacagcagcatagatggcgatggggtcgaagccgatatggcttcgcgctcttctagaacggatgggagtggaaccatcactccccggcatcacaatttgggtcgccttcatggacgcaacggcgtgcatccaaatcttttcgataacgacagtacgcactcgcacggtcaatctcaaaagtctccacgccatttcatcgggaatagctataggcattcgcgtcacagcaatacccggctgtctcccaactacagaactattagcggtgccaagaacagcagcgagtttcatgggtatgactacgaggcagagggtgcggatgacgaacgcacaccgttggtaggtacaccgcgtacactccatagtcggagtggtcgacggcccaacagtgcaagcctgcgacagatggagtacatggcgcaccgagaacgcggacttttcgctcgattcggctcctgcgctattatcttccttatgttgttgattgtcgctggaggagctacatcattcatcattgcggcaacccaaccccttctagatgtccaggtcattgcgattcaaaacgtgctggcttcggaacaggaaatcatgttagatttgaacgtgcaagctgtcaatccgaacttgttccctgtgaccattgacgacaccgatgtcaacatattcgcaaaaagtcgatatgttggaaccgacaagttttggcgtgagcatgatgatctggataatatcccacgcgtggagcaaagccgacgtcgctggcagctgtcacaagctgtgaagtgcctgggcaatatggactgtatcaagaaagccatgcctagcttctctggcccccacgtcaccggcggagttgacaagggcaccgatcccccaaccgatccagaaggcgatccgcgatctatgttgcttggccgcgtgttccacttcgattccccgctatctttcgaatcatctccttggaatcatttgacttccagttccaagggacagatacgtctaggccggccaggaaacaaaaccgaggctggaggtacagagcgctgggagcgaatcctccaacacccgtttgaattgactgtacgcggcatcatcaaataccagctcccactcagctcccgctacctctcggcatctatcagctccagcatcaaggtggtgcccgataccggtgacaacgatccggagcaaatacctccaaacaacggtacagtgcaaatttctgtaccacaaagaagtgcacaatccattcgccttccactcgatactcgttccaccgcatcggaggattcgagacgacctttcacggcataacaaatttagcgatagatcgatatcattgacttacgacagcctatttcgtgttaattattttttttttttttacttctttttattcttcatgtaacgcgacgaaaagcaaagagcctattgcctttggcggcccactctgtatacattatacagatacgcagtatggcctctatcttcccttcagacttcatcccgcagtataccccgtttgcaatttccgtctttttgtgctcgcaagccttggagaagttctatcatggatcaactctgtctaggtctcgtcttccctttccgtcttttctcttgtcttcgaaaaaaaaagctatctcggaaatggctctcttgtgttggtcacttccttcgttggaatggatgcatgcccttccatccattccttacatggcagccggccttacccgcttttactggaggttcttttccatgtctattcttcctggtgcgaagcatgctgtatctgtactatctgtctagtttctgactgatctcagaattggtcttgtgttatgtatctctttgtacagcgggactttgagaaagacatttttcgctattagctcagtcttcgaatatgagacgggttgggctttcttaatttcgtttcattttattacagggttccgcatctgtatttctttttgttcatgtcccttgtaaaaaaggatatgtatatcctttgattttggatacataactatattaattggttaaaagaacagatatgttaggtgtatatagttcaacttgtcttctgatttggcccatgacatccatggattcatttgcacacgccgtgcaagatccagttctacttcgaattcgctcgtagtttatgctgctcccctatggttttacttaaaaggatccgtaccaaaaagacttttcaaagtatgacctatattatcttatgaaaaaaaagcaataaggaatactctatctgaacacatacacatcataaatcattatcatcggcggcaggcatcattcataactttgtgaccaacaagattgagcatgaaacatcaaggataaaaaacaccaaggataaagaagataaagagccaaagagatgtggttaatgttaaaaaataaacttgaccaaggcaaaacaatccacctaaagcagaagaactagacataaggtcaaaggaatagacggggacaaagtgggataaatggaacaccacacagcgacccgctagaacagaaccttggtaaacctattcaccaggtcctcaaatttatccacagcgggatcccgctcgggaagagggcggccttgcccatcaaagcggctgggtaggtcgatggttgagtcggagtctgcttcaggggctttgttctggtctctttcctcgtggtgtttcggggctgatgggtgatgtcgatggtgactagaatcaggatagaaattgtgacggtctgaggcagtagaagaaggagggggcataggtggatagggcacggatgaggagcggcgatgatgatgatgacggctatcacggtcacggtcacgatctcgatctcgatctcgatcgtgacggtggtctctacctccgcgatgcgaagacgaacccgatccaacggtagagtcactgtcatcggtctcgtagccaggatcgtgcggaggatccgtcaagtcgaacgcgacagatttcggcggttggctaattgaccggggggcagacgttgggaatgggtggatgttcagacctatcgattaaggatcagctttgattacattctatacagtcacagttgtggtccgccgaacccacccttgtgtgcgtggtttgcatcaataggtaggggtctcacattgtcttcagccctacgcggccgatgtgtgtactgctcgggtcccggtcctggtggcgcagcgccgtaggcataaggctgaggtggcgcagcaccgggtggtggagggtagtctgctggattgtatgaagcgggggtgctgttcaggttgtaggttgagtcgcccgggggcggggggtagtagttggggttggggttggggttggggttggggttgctggggtagtagtgggggtcaggcatgggcggggcacttggggccgcctgcggggaaagcgggtatggttctggattgtaggattcttcataaggatcacggtgcacgttgtcgtcatgcgctgattacaccactagtcagggtaaatatttctcggtaggaatttgatgaagtggggacttactggagtgttcgcgatcgcgctctctggacttgcgacgctcgttgtacttgtgggcggcataaccgagacctgttgcgcctagtgcggcccccgcgaggtctcgtgagcggctgcgatgccgtcggcggtgaccttcgccgtcagaactggatgaactgctgtagcggactcggctacgactgcgactgcgactgcggggatggcgtctggggccataggcttcctgttcatcgtagtagggcgcatcaggctgaccgtagtaatgctcagatgggatgctacctgcgactgggtcgttgccgtattcgatcaggccggccgagtcgcgagttggatcgggataggactgtgacggggcgcggctgtgagaccttgagcgatggcggccccggctcgagccctccttttcatctttgtcactcttctgcttctcgtagagaccggtggcagcagcagtggcaagaccggcagccacaatgggaagagcttgtctcaggcgggatcgggagcgctcaccctttcgagagcgcgactggctgcggaccttttcaaccaggccagccacggccgcaccagccaatccagcctcagccatgtgcttgcggcgctcagacatgctgcgtttgccttgttccccatccttctccgagcgaccacggctagaaacccgagaacgggagcgagtgcgagaccggcttttgcgctcatcagcttttgacttgctacgcagtgcagccacaccagcagccacggctgcggcaccaactcccagctcgagcaaagtctttgcacgagagtgcgattgagagcggctgcggctgcggctgtggcgactccggccatgtctgctgtgacgatgggaagaacggtcatcttcaaaggaatgagaacggtgacggctcttactacggtagtagtcacgagcatgcgatgcagcactcacagcgactgcaccaagagccccggcaccaatagtcctaccaatacggctggcgccatggctgacttcgccatcttttttgttgtggtttcggagcaattcagccgcgccaacacctaccaatgcaccctctgcgagatggcgacggtggtgagggtggtcgtcataatcgcgggtttcctttcggatgtagaccatactgtcatcgctgctgtagtcctgatcacgatcgccgcggtggcggcgactactctgggaaacggaatcatcagggctcagctcacgccgggagcgagcttcgtcgtactcgcggactcgacggtgacggttgtaataatacgggtcctcgtccacctcagagcggcgcacgacatcatactcggattcacggggactagtataaatgcgggcttcacgaataagtacgggttgttttggggtggacatggtagtagcagtaggggacagctccactcggtccagggaaatccatggattggaagtgtggtcgattggtgtggggatgtagggtactcacaatcatagtctctctcatagcgtgtgggtggctcatactccacctctcgctcgtagcgcgagacggtcacaggctcttcacgatccgttttgcgccggatcaccacctcgcgctcgccgccaaaggagtcatcgtgtctcgacatgaagtctcgacggtcgtcttcgggagaaatgacgtaacgcttgattgacacaggacgggtttcatcccagtctcgttcgcgttctctgtaagtgtacgacatggacgtaataagggtagtgagaaatgggaaataattgagaaatgagtcgagaagtaaaagatgaacggcaaaagaaaataagatgtactgcagggaatggaggggcggcagagaagtgggggtgtgcagagaggatgtgatcgactaatggccgaagatgactccagtaggtacagtcctctcgggctaattctgattggtaacggttatcttggccaaataaatcaaagccaataaaagccggtaaaagcccagtgggtttgaataatgattcagaatgatgagagccgtccacaggttctgtagggcagagagcggagtatgtattggcacgcactcaaccggcttagtctcagactagatgatcggcaggcagcactatgtatgttggcctcggataactcggaatggggatttgaaaggcagatgataaattagtgaacaatgaggctgcgagatgaaaatgtgaaagagaggatggaggggagaaataaaaatggaaagaggtcaagaggataaaaagaccagacacgtgaggctctttctctcgggtttggcaatctttgcccgggtacggtggcgaaacacgcgaaacactcaaagaccgtggctttattttgtttacaacagactcacttggattgtttggttcttcccgctgcttaacccacgggattctctcggctggctcgggatgattccgtggtccccaattttatattgatcctacttcggtagatgcagcctcacctaaatgtcatctgctgcattgacgggtacatctaagaatggatcggcgctatatgcacacagtcatgagagcagtttcctgtaacgtttcagtagggcacgactggattagctacaatccacacattgtattatagattaatcttgatctcgggttagcattttaggttgccgttttaaaatgattattggggtcttagcaaagaagattcgttctactaggcgccctggaggtgacatcatatggggagcacaaagactatccccaataagagggcaacaagaggcgtataatcctgagcgccctggtcttgatttccgtatgggagccccgcggatgacgtcaatgtcatgcggggcgttcttggcaactaattgtttatgtacccaagtacggagtaggtaactacaacttatgttgtagtgaaggctgagtccatcatgtacttcgcccctggggtttgaacaataatggtataaaagaaagaaaaaaattaagtgggtctctctatgttatatgcagaggccaaaaaaaaaggaacagagacaagttacattgcgtttcctcctgttgaaccaataacagatagaatcatcgttggcagatattgagtcccgaggcagcgattgtaagacttatgtttcaagaccacgagtcacagatgacgacagcatcgctcaaaacgatgactggtaaagcctagactcgtactgcatatgctgtgttggcgaccagcgctaaagtcaggattcgtcacaacattgtttccttgctatttttacaaggccgtgtatcggcctttgtccaccgagaattttaacaattaaccttttgctcatcatggtatgagtggcgttagatataacaccccggtgtcttttaggttttgtcgaggttacaaccttccaaaaaattagcacggagtaggttcatatttacgatagtaaaggcggtaaaaagtataggccgtacagagggcttagttgtatctcagtgccagtacccatcgaccacccgatatgactagtaatacggtgatcaccgtgaccaaggaggaaatccactttcaaacgataggaaagtagcatccggggtttttaatacaacatacaatttaaattcgttggggatcaaatcatctggcaccctttgctcgcatctccaatccacctgacatgtacctgacagtgcgtttcttcaaccccgctatattttttagtccaggttacaattttagtttatgggaagtcattcaaattttcccttatcatttcatgagagaccccagcctagtgttagctagaaaccatctacgtgcgacagtgcgcaccataatgcacacagcagaaataattgttgaatttcgtgtcgaacagaattggctgtcaatgctagtgtcgatgtcatggattaccaatgcaaatatccttgtggggccgttgataagcctttatacataatgaacataggaacaccgtactatgctagatctccgtctttctaaaggccttaggtacaggcaatctgacaggggtatcggttcgtgctgtgtcctgaatgagatgctcgaacgaaggcgaggatccaacacgaggcgtgaaaggctcaaagtcccagaggtagcctagagtacgcaggatcgaagaagcagagtaagatacgacctcgccatccgagttaacgcccttctgttcgacctgacccttagaaacccacggcgagatcaagagcgtcgggacgcggccaccgagacggtcgaaggagaacgtatactcctcgccggagggtgctatctcagtgtacgtcaggtcatccgggcgggtagccagcgggggtgggacgtggtcgtggaaccctcctgtctcatcaaaggtgaggatgaatagtgtctcttcccactgcgggctggagcggaccgcgtcgtagacattcttgatgagggcttcgccttcagagacgagaccggttgggtgcatggagtttgtgcccacgccgcagcaggacgggtcaacgaaagagaattccgggagcgtgccggctgccgcatcggcataaaagttatccagggggactgctttgtcggagttcccactcgtgaaggtccagtcgaagaagtaggcatcgaccatactagggcttgtgtagtagttcttccaggtatggttggtttctgaaagctgctggaagatcgaacgttgggtgaggccgtggacgcctgggttgaaggcctcatcgttggtaccgtgaccagcggatgtgcctgagagtacaaaggcccggttagggttggtgggctatttatatatgttagctatgcgcgacaattagagagtaggaaatttgctcggacttacaccggggtgatccgaatgccagtggttgaaggtgaggtagttctgcaccagcgtggtcattaccggcacctcgtcctcgatatagtagttgatgacttgcttggccaggtacgccttgtcagcatcgtcgccatagctgcgtaactgctcatgcacaaagccatgctgggtaggagtgagcattccctgagcaatgtggtcattgcttgggatgaaagtgccataaaactcaatattgttcccagtcaccgagtgatcaggatcatccagaacagagtcaaagtccttggcagagctgcacacctcgccagctgaagtatcggtcaagttgtacgggttgcagaaagggccgttgttgatagggttctccagtcccttgagagtctggccgccgagtaggttgtccacagagcggttttccatttccaggatgacaacattcttgatcctgcttttcagattggtgatggaagatgaagaataagagggttgctgagcctttgcatcagcggagatcgccgctgcaaaggtcaacaatccaaaaagggcactcgatttcatcatgaatcaaggagacaggtcggttcaaagtctgggccgagtgcttgatttcgggagatctgaatcaagggatctgatgtctctcttatatgttgcattcagccaaacatccctagcattcctcggaacaatccaatctcccgttccacgtgttgctccggaacttacggctcgattgagttctgtctagagatatgggtatggggagtggtagtaatcaggctgcggggtcatatgaatcaacaatctcacagggcggggggtgaatgccaatatgaaatgcacctgattggtgctcttcgcatcgtccccataactcatatgtgattggtcacttaggattgattggcaagtacctcaatcacgtaaaagacgtaccaacatcatataattgttttacttcacgccattgaggccggtgatttaccagtactaagttaccaccacgccaagtattcgcacagactgcgaaagtgccaacgcatgaacaaatgaccctcgaaaacgaggtcacgagttgtttggctaggtatgttcgttgcaagcaatttcatcaatgagacaacatgggctttcccacgctagcatgactaaaagagcgactttgacaaggctcggcatacagagtcgattattgcaaaaggtaacatttgatgcttctggctgatctacttggaactgctaccgctttctggatttgtaataccgctcgttctctctcatttttaattggtgagtatttgaccggcagaatttggggtgctaactactccgtagttattgaccaatagtaaataagtcccatggcggctgtagtctcacgcgctagtaattggctgttaaccttaggtgatgagttggattggctattttgtagagtccgatatttacgagtcagtccatcctacatatagtgagtacatttccagggttttgtcctggaattctggtcttttgctcctaacgcagcgggttgaccaggtagcacgtgacacaatgtagcattcggagaatatccaaataatacaacatacatgtacaagcttgtatagatgcgggggtgaagtcttcgatcaagaataactcatctctatctgtaaagtatagatgtcaaactaactcacccttattgtatatgtacctgtctaggcatatggagatatctttttatatctaactttattataggcacttgatcatcagctatgtcttcgcaagggagaatgctgcatgaagcagggacaatatgcttccgaaagaggaaggtcggtatatatcacgtgttgataccttatattggcacgcaatgtttgttaagtatcaccacgcgatggaccagattaattgtatctatagactataccctttttaatatatgtttgatttttgaacccggggtacctgaggactcatccaacgtgactgtttagaagattccaattttcttcttacatcgataatcggggtaactgtcgatgatgccatctacaaatgtctccgccccgccatgaaaaacaattaataatcatatctggatttccaatctaaccgcccctcgtgcttcgtcgcttatatatatatacatcgcttattttttttttcaaaaaagccccttttgtttctaacttgtcacatagcagtatcctcgtactgtgaaatacattccctctcatccgcaccgggttcaacatcccactactcccatcgcgaggaaagcaaaacccaacaacctcgacatcacacaaaccctttgatataaaaccatcgacacacaaaacattataaaatgacgacagcagcattcagatacatcgaccgagcttcctacgaccctgatgccacagagccattcaaaaagccatggggcaaagtcgacggaccaggtcggtcctaccaactcacagaactggaacgaaaagtcgaggacctccgaggccaagaatcgaacttcacaacagacaattccggtttcgccttatacaagtcacccgcaaaggagaccgcattcaccgacgatgctgaagtgcgagcgggttactacccagaagtagaagacctgctgcgcaagaaactgcccggggtgaaaaaagtagcgatcttcgaccataccatccggcgccgggtgccgggctcggcgcgtagtcctgtgcagctggtgcacgtggaccaaacgcccaaagctgccgaggcgagagtacgtcgccacctgccagaggatgaagtagaggagctgttgaagggtcgataccagattatcaatgtctggcgtccgattgaaaatccagcttctgatttcccgttggcgctgatcgattggagaagcattgctccttctgattttgtcaaagttgatcttctttatccgaaggagtggcaggagcatggagaggtagcgcctgattctgagtcatttttctctacggatgggtatgaggtcaagggagagacttatgctatcgctcctaatcaggaacatcgtttcttttacgccaaagatatgacacccgaggaagtcatgttcatcaagtgtttcgattcgagaagccacactatgactgggggcaagacggatattgctcatgggtccggacatactgcatttattgacccgcagactcctgctggatcgcccgggaggcagagcattgaagttcgatgtctagttttctacgaataagccttggggttctcatgtcacaatgggtgatgcagtcaattcaaaaaaatataatgtctcttatgtagtttctaccctgtatatcatatcatcctcattatcgtgatttatgttccgaagttgtcaatgagtggggctcggccgacagtcactcagctcccaatggcactagaatgcgcctttgataagtagtaacattagaaatatacgtaaaaactccgttaaacagttaaaagatacgcagattacgaactaaccctgtcttggcaagattatgtgtacgacttcatgtgagtcacagaacatcccctctctatcgttttttgactcttcacatccactagaaattttcgacatatgtagctcgcatctatcgaagtgatctgccaatttatcaatttacaccaagtccgcccacggagctgcctagatagtgagccctaacactgatggcctcttctaccctacaacacactaacatctaccgcaggattcaaaatgtcctcttcaacatcagaactacgagaccaaccagaatgctggacaaagggagaatacgtagtctcaaccgacgtatcccgaatccctatcaaaactctaaacacctggtacgctggcgaagagttctactgggcaaagccaatgccggagtccgctttgcgcgaaacattgcagaactccctctgcttcgggctgtaccatgatccagaccaaaccttaagccagtcagtcaagacaccagagaacgacgcattggcagactccacaatcgaattcgtcggctttgcccgctgcgtaacagactacacaacatttctctttttgacggatgtctttgtacttacctcgctccagggccgaggcctgggaacttggcttgtaagctgtgtgcaggaggttatcgagacaatgccctatcttcggagatcgctgctgcttactagagattggaaacggtcggtgccgttttatgagaaggttatggatatggagcttatggtatgcaaccctcctgttgatgggaaggatgcggtgggatttgctattatgcagcggaagtcttggggggctcctggggttggagagaagccctaggtatctcagcggggttgagaatgggttgctttgaaattattacattataaatagaattattgtggttagagatatagctgattgaaactcttttctttccatcacttcattgctcatatgcctcatgacctaaatattaattccatccagtatgccgccaaaatccaactcctaggcccaaaccatgaaattcaaatagtcatcatctcatcacatatttaatcaaacccatgccctccagtaccagaccctaacgtatcccatggaacagaagtaggaccgatccaattttgaggatgcatctgaccgaaaccggaatgcatggtgtgatcactggagatcgatgcaatagttggcaccggcgatccggattgcgagtgtggatgcgagatgttatagctgtcctgcattgtcattccctgggggaggtttgacattgagaggggcatttggatgcttggtaggaggtgagcgtgggactgggattgaatattggcttggttttgttggagttggacttgggcttggacttgagcctgggcctgggcctgggcctgggcttggaggtgggattgagagtgggtaggtgattgcgggttgtatttcgttgaggcaacatcgctagtttgtatgttagtcactagtccaggggagaatctaggtaagggcggggtgtaacttggacatacatcatctgtcgaattatgggaacagccttgctgcagaagacgctgcggactgagagcgaggcgaacatatctaaggcccgatcgagtatatctttgatctcttcgtactcggactggccctcggggatgagcaggatgacagccaatgtgactgcagcgtggaacgcgtggaaactgcctagtccgctggtataccatttgtagggcttgaacgattgtgtttcgaggagagtttcaaaaatggaaagtgaagccttggcggaagcgatgcacttagctcttgtagagcaagtttcagatgtaatctcgccttgtaggtaacggcagagacttgggcggaggaggagaaggagaagctgatggatctggctgtatatgatgtggtggttggcttggtggtgaatgggtagaggattgttcgtatcgagcgtatagcgaacctcgaccatttcacggacggatataatttccgcttcgagttgagaggttgtgaagcgggatgtatttgggtagctgaatattgtttcacaaatcttcgaggagattttatataatcggaaattcaacaggaggtaggtcacctgtgttgggcgggggaatgttgaaggtgctggtctttttaggtttgggctggtgagcagatcaacgtcgtcgatgtctgcgggcagttttacgtcttgcgttagagcctgctggtcgaggctcccaaatgctgtgttttggatggtatagagcatcattagtccggcccagacccgtcgtcgctcttctcgctcgattggcccgagggtaaaacgatctgggtctaaatggcaacccattgatattgcaacatgatgtgtgaatcctagcattgtccagatcggtagaccgcggtgaattcgggcgtaatttataagaactaaagcttgtaatgagttgatcgaatgtcgggacatcacaccatcggcggcgaggcaccgcaacgcagcagatcgatatcgtgctgacagcactttgatatttcggctgaccgttcgctctcgccctagatctgacagtagaggatggtcatcatcgagcgcgcttatggcgatagcaagaatggcgaatagcaaagccagccatgatgtagacacactgccaggatcatgacagaaatgctgatactcggcttcgaacgtcagatcgtgaagaatatggaaaacctaatgtgttatcagctagcgttcccccatttctttcatatgacataccgaggaaaagacctgaaaataaacatccttgagggtatcacaataccggccaggtggcagaatcgacaatagctcagcacgggatatacttccattcctcgccaacgggatctgcaaatcatcgtcatcctccgcgagatccgaatctaaattcggtaaacactccgcggcggggctattcgccactagagactcccactgcgaagctagtggcacatagcggacatgaccagaaggcgaagtacgaagtgtgccaacattatccaacatggggccgagcgagtcccatgtctcaggctccgagaaactacccgctgcactcgtcccacccagtggcgagactgcgccaccagtgggcgtgccagcatgcgaggtcatctgcttctggagcaaggcttctagattccgaattcgtgctagcagttcgttctgcacagtgctgtcaccgggcgaggactgctcagttgagagccgcggctggccgaggtagatgcagtcttcagcgcctagaccgcgccgcacgcatgtttggcatggccggccgtcgcgcgagcatctgatctttcgtattcggcaggcctgacagctgatggggaggcgcttgcctgtcaaacgggatgaggccatagattgggaagtgaggtcaaggatgcgctggactgaagcaagcgcaatcacctcgtcgtctgaggggattggagagagtgtgagattatagagcgaagaggagctgcctctcaggaaaatcgaacggccggtttcaaaaaggggtacttcgcaatatatgttgtgggtatggatcgattggttgtcgtctgttcatgggtccataagaaaatagggaatgagaacccacaatggatgagcgggggatattgatgttgtcagagttgagataaacagcggattatcgcagtcttctatacttcagcccgatccaatttgtaataggaggcaaccttttttggggaagccacatggggatgcgtgtgaatattagcggcatacttatttgcccctgtcttggagatgtcggccgagcagaaaataataaatataattattaccaaaaaggtctagggttcgacagccctggaggtgacaacattccttttacggggagaccgatgtatgaaacccttctataagggtgggaagggtccacgatcagagagttcagcggatatgtacctccgatgctactaacaaaatacagtatagaccgtaacagaccaccgggaccgcttagtcctaatagggctttgatacacctataaaccatggtttcgggccgacacccatgtcggccctttgaggaacacattgcttagcaccgaagaaagtacgaagatactacgatggaagtgaagtgtgtatgttgtatgtgtacgataccatcatacgtggatcatagggataactcgttcagaccgagatgtgccgttgccactaaacggggctaagccactcagcctgccgatcatttccccttgcactcggcttttcgtaaagatcggcgcgaatatggccacgaggggttagtgtggctttcctcagccacatgcgccatgacgacaatccctgtctagcggtagtgcgccatacttagaacaaccctggagggactccataaacgtgaaaattctgaacttttcagctcggagatatcaatgtcagttctagtggttcgtgtgagcgttgaattgtttatttttccttaatttctataggacccacggagagactggcttcgttgtgattttaccaagaatcactccattttgctgttgcttagaatattcgcctgatataagatcatttaatggaacgcactagaatattgttatagtaaagagcccttcctgcggctctccaattccatattcccattgtgcgaaggatcgtctgtgggctcggaccctccctcgtgttcctgtctctcgggaatccgataactttaacgttcaactactttatacatagtcactttgcagtaaaaactgccggcttccaggttgactccggggcaatccggtgaactagctagaaaagaaagagccaaaaaaaaacactacatggacacttcaaaataaagaatggaagtcaaaccaaaagtacgtggcaaacagtcccggatatcgggaagcatctagaagagccaactgttgcaaataatcacccgtagttccggctattcctccggattgtgggttatgcagctttgatcatcggtagagatcatcccgacgcgtggcgatagagtttctgaggcaataatatgctgtttaggcaggattcgacaactatgtcgtaggaatgtcaatattatattaccggctagaccgacaatgacagcatgtaattctgcatactcatcatcggtcgaacggcgaatggtaaacggcgaattactttgtaagtctgatctgttttagttccccatgcgtctggtggggaacccaaggctgaaacgggggcaagacacgagctgcgttccacaagttcttgctttgctttttaatttaaatacttcagcccaacaattgtttctgggtaaattacaaaagccacaaatttaatatccagtcagaagaaaggggttggaattctgctacttgcaacaaagtgaagaatatttgaataaatgtgcacttctgggattacggttgagatggcatttgtataagcgcctggataatctccccgaagccctgctaaggcagggagttcagactgcctttgctgtttcatgcgtcgatacatggctagattcaatgtgctgtgtctcgccaaccacactaagtgcacgcttaggtccctcgtcctgagccacaacccggtcaccgaacgcagcagccacttcttcgagagtcttttgcttggtttccctggacaaggttagcctcttaaattcttttgatctctttctcttcgtctccgatgaaacaagttgaagggaaatatattagcgacttacgggaagtaaaagtaagcgatcaccaagaagaatgcagagcagactacaaagacgtagtagtagttctcgtggatattggcaaaagcactgggtccagcttcggtgactattttcggatgaagaggttagcaattgcatatatagactatctttcacaagaatagatttcaggcttactgccaacattaacgataaaatgagatgcggcggcaagacccatcaccttgctgcggagagcaataggaagaacctcggcgccatacagccaagtagtactgttgagcatgccatctaagaagaagaaaaacccccacgttagataatttcttgcagccatggtccgagtccttacaatagcaaaccacaaagaggtaaattccgagaatcgcgaaaccctttccgatgtggttgtctgtattctggaactctctctgcatcaccgcggcgtagatttcgatcaggacaataccagccaatccggtgatcagcatcctgtagacggttagcagcaggcatgcgacatgataacccagggaatatacttacttccgacgtccccattggtcggtcatgtacattgtagtgaccgaattggacaaaaaggcgatggtaccgtagactgcagccagagcgaggatcgtgtgtgacccgattccaaggcccttgtacagaatagctgagagatatattaacatcccaataattcccgcttcggcgctcacaccctgaactcactttgataatactgaatgacattgacacctgtcaaactcgtcatcgtctgcacagcgatagagctaaacatccaagttagttccagaaatctcaaatgcaaccaaacaagaaataaacaaactcacacaagcacccgatgtctgaaaagtttaaagatatcccgcaaagaagtcatctccctctccatctcatactcaatctgcgccttcataagcccaaactcctcctccatatcatgcaacacaataccacgccgaatgcgcgcaaactcgctacgcgcaaggtcaatcttcccctggcgaatcagctgtcgcggcgagttaggcatgaaagtcgaaagaccaatgaacatgataattccccaaggaatttggattcccagaggcagccgccattgtatggggccgtagggagcgtagctgcaggcgtagccgacccagttcgacatcattgttccgaatgagatgccacagccggaaataccgccgatcagaccgcggtatcttggatccgatatttcactcaggtagattgggactgttgcaaccaggccacttagggggatgttaatttcgtttatagatctggtgaagagtatgggtggcttaccctactgcgaacccggctagcacacggccggcgaggaacatgccgatgttgacggaggcggtttggatgatggtgccgattgtcacgatcacgcacatcatttgcatgaagcggattcgaccgagtcggtcgccgatgaatgtttgtgttagggcgccgacggcttcaccggcgatgtacacggccacaacctaagatggtcagtctctgggtctgttccgttggggtggaggttaaatggctgggtgaacatacagctcctgtgacgccatttgatggcttttgcatataatcaatccagctttggtgggcaatcgctagtaaatccttagtttgagttgcaaagctagaatttgtggataataactcactagttgtggcaataccagtatcgaacccctattcattgaagtcaacttcgtggttgtacacggtccaagaccaactgatcttggaagaagaaatcaacttacaaacaagaacgtgcctatagcagcaaagaaagcaatacccagcgaataccacatcgccatcttgaataattctagattctccgcaggatcagatagggaagagaagagaagagaagagagtacgtggatatccaagaactagaaacaagaactacccccggtatattacttgatctctcacaggagcaagccgggctatatccgatgggccgaggatgcattacacagcagacagacaagtgacagacgacacatacgcctatactcggaggagggccgaggaaaacaatttctggggaagcggggaaactggggtaggccgtggatacgaggagtctccactacaaagaacttttcagggccattggcatgttttgagccgttgagtctcgcaagattggaagatggctggttcgaggctctcgtttggtcccccagaatacggggttggtgtcctcggtgaagatctgcatcttcatatcacattctctcagtttcggtataacgactcccggtccgtatgaaatggaggattcttgagaaccgggttcttggcaaccccctcgagtctcgcccttcggtgttttctcgccttgattctgctaagctcggatggtatattttgcttcctttgggaatatacgtggactgaaatatgtcgcccaggaggaccttatcaagtgttcggggagaccctgatgattgtgcagagtgtagtccatcagtgactagtggtttccgaatatctctttgacaaaccgtcagtaagctaactagaaaactcgggggtaaatgaagcgaggcatgggactttgataagtctcacgagatactccacgcataagagtggacccataaagggagtcttggcaagaattggggggatatactttgtaacccacgccgagaactctacatggggaacatggggaatatttgagtgaacatccaagagcacaatgaacagcaacgcgtgggggataaagtgtatcaccgctgatgagggtactagcagctctactgtgaagcaagaataattattcaacaactcataatccggtagtcatagatggtgattttgaatagttaaattcctatttcatttttccattgccaatgtcatatatgctccgcaaaaacagcgaagcactttgtgcaatgcagaaaacccagaagccgaacaaggaaactgaacaatctagaaaacaagggcagcacccttggtcttcttgtcaccactgtaaaagaaaaaggcatgtcagcactgtatagcgaaacagtcaagcaatatgtagatgtaacataccccaactcgaagtgcttgcagcgcttcagggcgagttgcttcttggccttgcaagcagtacactcgagacgcaggacgaccttcttggtggtcttggccttcttgtggaagacgggcttggtctgaccaccgtaaccactctgcttccggtcgtaacggcgcttaccctgggcgaagagggaggcctaaatcacaaaggatgacatcatcagcgatagctcacgactaccattccggtgtcgagggcactaaccttgccagccttgtactgggtgaccttgtgctgttggtgcttgtggcactccttggacttgcagtacgtccggcgggttttgggaatgttgacctgtgcggagagatgtcatgagcttttgtctttctggtctgattgtgcgaacaagatcaatgtcaatgtgattcgtgccccgaagtccgattcgaaattagtgcggtcgcaaagagataggtcgtgttgtccagtttgtagttttcaaggagtagaaagtgcggttgaataaaggatggcggggtgcacccattgtgatctgcttcctgagtcctgaatttcatcacccagtgttgttcttgcaggtttcgccgccaatttcctcttcgatgccaacttttacattgcatcctgcagtgaatccggtgaaaaacagacggttgggtagttcataatgtggtgattcacgacggtcggcgaaggaattgacgatttcgaggttggccgcacagtagacatcacacattctctccacgactcgagcaacttcgaatggccggggcttgcggaacacttgacatatctcgtagggtgtatccttaccattttgactgacttggccggatagctgggtggtggtcgttggattgtcgcttgtcggaggagagcaagtgcgattgttgggttgtgggatttcactcgcttaggccctatcgggtaggcgctaacccttttaggagtcgccaagaagagtatgctgagtcatttataatgttgatgcctgaggctttactgatctcactgatctcaaacgtgttttggagtttggagttgattctcagcacacatcttgtattctgctatacaaacccttctccaagtacaatactatcccctagtccataccaactcctgcctttgatcaattccaaccccttctcatgacctatcacccattgcccttgagacgggtcccccaatctcctccacatatttgagcggagttcatgattgagatcctcgatcctatcaataagttgaaactttttcttctcaaattcttctggggaatccggctttatttctttggggccaccaggcgcaataaagcgcgcaatagtgatatgcgcagaaggtacggtatatctagccgcgattggacaaccagattcagtcacgatgttgtaaagatcgcttcgcagatgatgatatgtgaattgatcatgtttcccactataatcactgatatcttcctcgccagccgcgggaacaaagctcaaagcaatagcagaagtatcgtagctgattactggcttgaccaaccgggcacggtgggtgagagtgtagtttgccagctctgctacgaccccgctcatcttgagagaagaagtaatctcatcaatttcaggtcccctgagtgcagacctgatctcgagcgtggtcatgtgcagatgatgcgggggtacaagccagagacctgtgttgtagaatcacagttagaacagtctctttgtattttccatgggttatgcatcgcacacaccaggtccaatcaaggtaccaatctcctgctggatcttgtagaccaaatcccgaatatgctgtggcgggcgtgcccaaaaggcaaggttgtgtctcgggtcaacgtagtctgtcaaccccttctctgcctcgagcactttggacaggatatcatcctcgttccattcacagaatcctttctggcaaatttggcttctgaaaagggcatttctattgcttctatggacctcataggcaagttgcaatcgtttctgggtgggactctcagcatttggctgttgagaattaaagacttaagcttaccgggtcattctcagaaacagtgatcaattgctggaattgattctccgctttcgcaatttgcccgggttcattggccattttttgggggttggactccggttgactagtgaatcgtgattctagcctgtttcagcggggtagttggggtaaaactgcatgcacataagaagtggaaatctatactatcgactttctggctatcaaggggtaataatagacggtgaaaaggattatagttcgcgaatcaatcgctagtcagtaaatatatttttcttttcattatatatttctgaactctgaagctcaactcatcttcgaaaacggtgtccgaatcaaaaaaaacatagtaagatatctcatcgttctcaaaatatcctagttatgttctctacatcaaatcgtataactacatagttacattgtcgcaagccaaagtgaggctccgacgcaatcaggcaataaggccacaggcccccaccaaaaccccgccgggctcacatctcctctctaaacactcattgacaagagctgtacctccaactacattgcagccgacatataccttgctccattactactatccaaaccaccgaaaaaagccaccgacgcttcaatatgttgatcaagtgcgtttctcagctccagcatgtccataccattgcatcatcgaatgaccccaaaatgtgaaaggccactcacccctagacttgcatgctgacatttcgcgtccaaacagggtccgaactctcactggcaaggagatcgagctcgatatcgagcctgactacaaggtaaaccacccgccttgaggcatttccggctcctccccgcacggaaccactctagcgttctaccgaatcaacacccacaaaccccgctgcatcaacgccctctgaatgcgcctatactgatacggacggttctattcaggtctcccggataaaggagcgtgttgaggagaaggagggaattcctccggtccagcaacgactcatcttcggcggcaagcagatgtaagaaaccactcactcagttatttccccctactcgaacaaacccaagctgacaacttttcattaatagggcggacgacaagacagcctcagaatataacctcgaaggtggcgccacgctccacctcgtgctcgctctgcgtggaggatgcgctgcgatgttggtgtaacatctttttgtcatttttagataccacatttctgcagcaatgttaatcagttgaggaactagtgcttttccatcccgcatcccattttgcgaggattcgaactgcagggaccgcggcggagcaatgggatttgagcttaaatggaaaggtagttgcatactgggtgttctgggttgaatgattttcatttattaatgtcctcttttttttcctcaaggacctaagctcctttcatggactggcttggttttgctatacccatcttgacactacttccgggctttgtagatctacttcagtatattcgcgctatgcggcgggataaagacatcagtaccgcttactatgttttgaaatgaagccctgaaagatgttgtaaaatagcctagctgactgagttctgaacacaataggtgcgaccagcagccttggttgcactctccgaaatagctcaacttgagaaagtcgaaggatttccagtcttttgtacgcctaagtcattcgcattgttgaagagagggatatagcttgtagcattggaaaatcagggcccatatcaacctgataaacagagccggagttgtgaataagaatgtaattttagttaataccttttataaaaaattaccaccgagtgaatcgcaagtggggtgaatcccaccccgggtatcagaacgagcctagactacctatgtcccacataggtatatacgtagagggcctcctttcggagagcatatgagcatatgaatcaaagtgatccaaatatcacgataaatgtcgtcgctttgccggcatgaaaatgctcggcgccgggcgccgacgaataacgcccgggcgggaaagaggaggcccggaggaaggtgggcgggaggaggggagagaagaggtgtgagaggcgggaagagatgaagatgaagaagaataagaagaagagggtgtctcggcaccacgaaggggggaggtcggacggcccttcagcttaggcatgggctcagtggccacagctggcgacttctttacgctagacgaatcgccattggatgcaccacggggtgaggcggtggaggcggtggaagtcagtgcgcgtagtcgcgcctcattcttgccgagcatggggtgctgaagtgagggtggaagcatgccgggccgccggctgattcgtgggggaagaggttgcgcctttgatatcggctgtggtgccggctgctcggcggggcggcggtgttcttcgaccagaccgatcggtgcacgcttaacttgcgacgcacggttgttgagggacttggtaggcatcgtcagcgcagtgttgcgtttctgcggctggaagatactaggcttcttttcaacaccaccgcctatcctgcgatcatatggagcatgacgctgtcgcacagacggtcgggatccggccatgcgcaagcccttgctctcgggtatgagtttgggggtgaggagtgcacgctttgcactgatgccgtcaatcgccatcttcattctctccgcatcggcatcaagagaacgttggacttggtcgcggagatcacagtaaaccccataccagttgttggtactatccgggaggtggtacttttcccactcaggaatgtcccgtttaatgagctcaagccacagttcttcgtcttcttcggcgaggtggggggatgcgagctccataacatgctacagatttagaaagaatgatattagaagatgagcttgaaactgaaaatgaagcgcgggtgaaagaatagttagacagtgaggtctagtagacgtaccagcttttcggggttatggatattaagcaaaataggacgggcgagtgagtatggcatggcccccagattatccaggtctgaagatcacacatttagtccggagtcttgcaaaatgagagagctcggttcatctatacctttgatgaagcggatagccgtggctgtagccaggtgaagcagtgatggggctggcattttgcttatgacggcaatggttcaagccgaattgggtaccataagatatgcgacatgaggtgaaagcaagtactagatataacagagtatacgaggcgcagtcgcattcaaaagaataaaggacagaccaaaagatgccagatgcgacgcgattcttgtggttgtcgatggtaggagtctcggctttaaataaaaggatgatcacgcggtcgacgctgattggctgcgtcgattcgttgcttcatttgatattctttgttctaatgtttccaagccacagctacggactctactgattgaatattcgtaagatctgatgtctgctcaagtgagaattgatggcctgcatcatcaagatgcctactcgaggaattcaggcttcattttgtcgttactcgtgaatcaaccacaacgacgacgctatctcttgtgaatctcaaaatcaacctcgttgcccctaggattatgcaatcggcacacatatactccgtagcaaccctggaagtaatgtcagatgctttagtttatagtacagacgaaaccttcatttatccatttatacgacatctccagattcacaaagtattgggaggtcgctgaaatgccgaccataagctcttttccctttcgaagcagctttttatattccagcggcttcttgcattcattctgtagtgtctcggatccattgtcttcggaacttgtcgttgtaagcacgtgatgtccagcaaacaatgcaatcatcatcttgatagcatcatcgaggggcatttcaaagaactttgagaaatcgaaaatcagctcaccatatcactaaattctgcctcagatacgactcacaggtacgtctattatggtatctgtttctgccgtgatgctcgtctatatacacagtgcctcgaacaatggtaccagcaacgctagtcgtactgctatcattcgagcattccaatagcgtcgattagaacatacccttctcgtcatatggcgcctcttttggcaatatcatacaaggcctggactcgaaacctcggatacgtctgacccttcacacagataatcacaatggcaccccgttcgcagctcgagatcaccacttcctccgtgacccgcttggtcaaggaggaagcttcttatcacaaggagcttcagcagcaggctgaacgtatcaagaagctggaggctgataccactggtggcgacgagaaccgcgagtataccctgaaacaagaggtatgtgccttgtacatgagctttgcttccaccatatcatcttgcctctaatgctgacatgaacgatagcacatgtctcttgaagagaccaagaaggttctgcccacattgaaggagaagattgtgcagaccgttgcgaacctggaagctttgattgtgagtactacctatctgtattcttggattctattaaccaaatttgatagatcgaggagggcaaaaagggatcggacagcaacgttgagcaaatcaccgctgccaaagaagccattgctcaagccaagaccgcacagcgcgtgatttcgtgaaagacatgtcaattacatcagagcaaaaaaaaaatacccataaggtggaatgattccatagtatcattcaataaattgaagccatgcccaacgccggaccaaagaccagaactccttgctagtgctagtaatgtacatgccgaaatgcatcttcaggtagtatccatcttcccgctgaaatcgtcggggagttcctctccttcctcgagctcggataattcgccatcactaaccgcagaaatttcaccctcatcaagcatattggtatcctcccgtgccccatcgccctgagcagttgtgacttgccgcaaaggtgacgcagcaccggcagccccgggcttctgaacctgcagaccagatggccgaccggcatcgtcttggccgtgttgagagggggtcatggcatcgttttcaggtccaggaggagtgtttccactgctagccttgcccttggatgtgacatctccctcgtcgccgtcttcgccctcctgcatgccttcccggcgctcgacttcctctttctcatcgcggatcaggcgacgaagttgcatcccctcgtccacaatacgaccgaactgctcacggcgctcagcccaggtcatcgcgtaatccttgctttccttctcgagatctgcaatctccagccgtaatttctgaaggttcgccgactggtcttcgcgcggcttgagtaggcggttgctcgtgattttgtccgtcaattcgtcataggtctttcgcaaggagagaagtcgccgtgcctcttcaagctgagttcgtagatcggccgtgctttctcgtacagactgcattgtcgacagaatctgaactcgctcggtagcatatcgctgtcgttcttgctcgttgctggtaagaagaaattgcacgcgggcaatgctgccctcaaaggtggcaaagtcgagtgcgacatcctcgcgaaagtggtgccattcttcgagtcttttctgtttctcggcttctgttgcggtcgcatcggaatcggcgtcggtctcttcggggggaggggtgagagggagcgaggatcgcgagacaatgagggaatcggggttcaatagtcgttttgagattcgcttgaatggcttttcttcgacgttgaggagacgcgacttgtggagcgcatctgtaaaagctgggccgttaacgttgacctgggagaacagagctggagtggactcgaccttcttctggctggcctagcagcccgtatgaagccattttgtgtatctgaatatgaaattcgatctcagagtttaataaagcaggatatatgtattgaaagggtgcacggcttcaagctgatcgaagcggggagggatatgaaaagtgaagccgagcggtctggcacttaaactccgccttaaccttattgactccagttaatagccatgattcaaccagttgtgctgcataacaggagtaatcgactttcttttacatattactcatagcccccgagcttcttggctagagaccatctcaaacctacccagaatcgctcgcgtgcttacttgaggatcacgctgtactccgcaatcccaagctgtttgcaagcacgacctggtgaagccacaaccagagactcgatgaactttgccgcgcaagaatctgtgactgctgtcctagctactgatatctttctgtcctctgtacgtgtctcaggttcatcgctatgacggagatgtattccggcctccatgtgggccagcggttttgctctctagaagagttcaaaacagtggtacggagcatatcagtgagacaacactgggagcttcgtgtggtccgtagcaacaagaagagcgtggttatcggatgtcgatcatcggcaaattgcttctttcgtgtcgtctgtcgctcgaacaaaaatgcgacctacatcactagtcttcaagacagccatagttgccgtcggagtgaaaattcccctgaggacacgccagctcgctctgaagcttctcatgtgcgatttctgctgagtgagatcccgaagcttttcgatatgaagtcgaaaatacgagcccaggacgttgtggatgctgtaaaacgttaccatgggtatgacatatctctgcgccaggcacagcgagcgcttaccaaacttcaaccacgacatgctgagggccaggatgaacatgagctgaatatcgagatgagtacggaggaacgacagtcgcccgagcaatcccccgagtcgcaaggggaaggggtacacgcatatggagacatatctgagaatcactggctttccgagcatatcgcatcatcatcaattgatgatgataacgtgtccccaatcaagacccccaaaaaccacgtacttgctccaccatctagttcccaagccctgccatctccaccccaggtgccacacgtacatattcccacatcaaaccaaccctcttttaatcacagccaacatccaatgtctatacaaacaggggcacaatgtcagaccgctgcctctttaccagtaggaatggctgggcgtccgaaagactaccctgagcgcagtgatcatgatgccgccccccagatggttcttaccaatttcaagattgaattcacctgcacaacctgcgggtcactgaatcagagcttcttcccaaaccagggcaatgtcaccggtgccagctatatggtccatcatgctgtaccgagtcctggcattatcccaagacacgggtctactcaaaatggtgttggtggcagtagcaatgcagtcggcgaaatccctgcttacgaggttaatgcttccaacacatctaccattcagaatgcctggtctagtgatggcctaggggttcaaattggatcggcacatacctaaaatatcatgttaagaggatgacatcggccaccgtgttgctgatattggtattcattcttgcacgctacaacctgagccaacacgagaactagctgactttactcaatgtatggtatttgatgccttggccgttccggtctcagaatttctacacgttctatgagacgtcaatattagaagtttggatgcttaatccaggacacgatggcaaaatctaacttaactctgaagagggttagtttgatgagtcttttctgggatctctgttttgattttgaccctgagatctctatattggttcctcttatgccgaggaagtaatatccgagaatgacctggggctggacgatatcatcagggctaatattgttatgaagtcaacgagctacgccgtttaatcttgttttgataccacctttattgaggggcgaatcctatctgcttagttctgagaccatcggctaattgcattctgagtacgttccctagaacaaagtttcttcccccatgcagagctggacgaccttgcgcaaacccgctctccccaattggtaaaaacgagtagaccatggtgaaattttgaactacttagataaatttgtggcgatgttgatagaggaagagagctaggctatagaagctatatcaaagcccaacggcttgccttcgtcaaaaatgccctcggttatggactcgcaaagagttcagcataggcggcggtgtgacgtcgctaaaggtacatatgcgtctttcaaataataataatagtagcccaattggtcaaagtgaccacacaataagcgatcaagcagaaaaatagtggcgacacttactgcggagaaatatccggagataaaggcctaaattcctagattcggtaactagttagtcagccatcggaggtccgatcggatatccgaccccacggatccacaacagactctgctcttcgtcaaccgcaccgacaaaatgttacggaattgagccaacagtgtctggatcgccattcatcggggcgatattgggctacaatgaaaaccaggcacacagatactcacttgcatcggacgtggatccgatatgacatctgccagcggcgctcaagctccaatcgctcagttgccgatggatcgaaaggcactaaaatcctgccagggaaaaacttttcttatcaattgaatgactcttatatgaacagacttgccgtgggattattagcttatttctttaaataacattaggaccctcctcattccatacaattgtgcttcggatagtataacgccaagcccctaccaaccttaatatactccgtgtgcaatatcttctacacttcaagctccatggccttttacggaacatctcagataatctaagggaaattacctctttgagcaagcttggcaccgctacatctgcagccatgaatcgacaacgagaggccgaaaaggcccttcacgaccaaacaaatattctccccttcgcgcaactcatggttgtcttcacgggccttgcaatttccttgctgatctgtatggtggatcagaatggcatcagtgttacactaccaacgatctcacgcgagctgggtgcccaaaacaccatttcctgggctggaacttcgtcgctaattgcaaacaccgtgttcaccgtgctgtacggccgactatcagatatctttggccggaaagtcatgtacatctccgcattggtcttgctgtgtattgcagacctgctctgtggcttgtctcagaacccggctatgttctatgtcttccgaggcctggctggtgtcgctggtggtggtgttacctctctgacaatgattattgtctccgatatcgtgaccctagaaaagcgaggcaaataccagggtattctaggtgcatctctgggtcttggtaatatcattgggccgtttctgggtgctgcattcatcatgcgttcaacgtggcgcggtttcttctggttgatttctccattggctgcttgctctgcagtcgttggatacttcctcattccgaataatgcacgcaaagataacttccgtgagaatattgggcgcatcgactggttcggactgctcgcatcgtccattggtatcatttttctcttgattcctatctcgggtggtggatcctatttcccctgggattcaccgatggtcattagtatgcttgtcattggaggttgtgcaatcgttgcatttttgcttattgaatggaaagtggcaacacttccgatgctaccaggtatgttttgatccccccatagtagtaaaaggacatccagttgacataaaacagtggtcttcttcaaaaataaggtcatctctgcaatatttttgcagagctttctgtatggtgcagtctaccagtcaagtctttactatctgccattgtactaccagaatgcccgtggctggtcgccaattgcctctgcggccatgacatgtcccatggttgcggcccagtcaactttctcaattgcatccgggctatacatcacacgagtaaagcgctatggtgaaattatttggattggatttggcttgtggactttgtacgttgatcgatgcctaaatgctcttactttggtcccatactgacgatatcattttcatagggggtcgggcctcatgttattattcggtacccacacccatccggctgttattgcagtcattgtggcagttatgggcgccggaattggcttcacattccagcccactctcgtggccctgcaagcccattgcactaaatcccaaagagcagttgtgattgcgaaccgtaacttcttccgctgcattggtggttcatgtggcctcgccatctctgcagcaattctccaggctgctcttcgctctaatctaccaaccaaattcgcgtacttggcagagtcttcgtactcacttccttcaaaagcgaacatcagtgcaactgagtgggcttcaattctgctttcttacagcaaggcttcccacgcagtattcattctgcaagtccccgtcatcggtgtatgtttcctggcatgtattttcgtgcgtgacagaggtctggaacgaccgaaagagccggaagagcttgaggaggaaaagcgaaaagcccaagagagagatgccgaggcggttacttctgaatatcccgaggagtgtcttgagacataccaccaggtcgagaagcgccattctgcgtcaacattcgccgaatcatccatgccgccttcccgggcggaacctaatactgagggatatggggagaaggagcagcattgaggcatgtactaaagcatatagggatctaataactctttgatttggctagatctggattttcttgggtggcgtgtgataccaaaaagcaaaaattttgtatagtttacgatatattaatataatacgagcatcaattggcgcttatgattgtccgagctacggagtcttgatgtcaatattgctatctggtaaactggaagttgtaagatgtgcttctgattgcttcaacccttcgaaatatctcttttatcacaagtagtaaaaccgcagaaaacaaagaagcaaaaagttcgggtgtttatcctagacgcctcgtaaactataggctagccttgatactaggagacgtcttgtcttggcattccgatccaacgacatctccgatctctttcaatctcaatcgcacctacaatggcgcttcaccggcatcttcatgttccaaattaaagctgatattttccagcaaatccgatatgtatgcgcccgggcagagctccgagtcatcaaggcagacaagtcccgtatcgcgagatcataacccgcggaaacgcgggaggacggcatgcactcgctgcaagacacggaagcagaaggtgagttccaatcggtaagatgactacaagtatctcgactaacggcttgtagtgcgacaacgaatatccgacttgttcgaactgcttgaaggcgggtgtcccgtgcgacaagtccagcgtccgagaggacaaagaccgtcagaatgagtaaggtccaagtatatgtagtagccgggaaagaactaatttggataccagttacacacgtggcttagaggagcgtgtactgtttcttgagcgtaaacttgtggagtcggatcgatcatcagacgggaataccgctacatatacggcgtcttcgctgttctctccacaaggtggtaacacaacgccacacacagctacctctggatttgacaataaccccgttggagaaatcgtgggccttcttgccctgagcggctctgaggcccctgcatacgtaggatccagttctggtctttcactcgctgccgatctgggagagatggtccaaacgagtgtatggaaccaattcatctcaagaatgcaacataaaactaccgccgccagtagctctcgaagtaaggctggccaagcacacgggccctcggagcagcccagcgccactcaaattcgagatcggacaacgagaatggaagatctcttgccggcgaatgttgaacctccaactgatgagatgggggcaagaatactcgaaacatatttcacccgacttcattctcgatatccatttcttaataggaaacatgtatggcagattcatggagatcgatggcgattagcgaagatcaaacgtgaggaccttactcggtctgatcgatttgctattttcaaactcaacttggtctatgcaatcggcgcaacaatgcttcggctgagtgagaaatatgcgtacacgactcccgaggtaatcatattcattaagcgttaagactggccgacacttacaagttttagcgattctatactgccgccttgcagcatgttcccacgatgtgtgaagcacgatcgattgataatatcgaggccatggttcttcttgtcgtgtaccacctccgaactgcgtccagtcatggaatgtggtacatgattggacttgctatgcgtactgctatcgatctaggtctccaccgaaaggcaaatgaaagcaatctggatccatttaccactcagatgcgacgaaggctattttggactgtatactatttagagcgagtggtatcaatgtctctcggtcgcccgttcagtatatccgatcgtcacattgatcttgacctcccactagaagtggacgacgacattgaagaccccacactactcacagcacccctagatccaaacaagaccacaactttgacattcgcaatttacctcttcaaactccgtcgcatcgactcccgcattcaacataaaatctaccgcgcagaccgccccctatcttctctccgaccaaaaatggaccctctatacatcgaattggaacaatggaaagaatccgccctattacgattcagcggtccagatctcgactacccaatgctgcacttcaaccgagcagtccgactactaatccagccattcctccccctcctcccaatcacggacccatactaccaaatctgcatcctggcagcaggaaacatatgtcaatcccacaaacgcctccaccaaaccctggagtatggccactccttcctagccgtgcaaacagtcttcatggccggaatcaccctcctctacgcgctatggacacacacagaccaagtctggtccgtccgcatgagcaacgacatccgcgcttgctcaacagtcctctttgtaatgggcgagcgcgcggcatgggtcaagaaataccgcgacgccttcgagctgcttgtcaatgccgccatggagaaattgcagggcaatgagactgcccgcaatgccggaatggcggagctgatgacggcccagtatgggattaattggaattctactactgctcccggcatgtcgggtagtgataagttccccccggtcaacccgacggggctggctccagatactgcgggtgctacgccccagccgcagggttgtccggctgatgattccgagcacgcggttaggatggcgttgcagctggcgccatggattgatcaagatgagagtgatcctctgtgggtgccggactttgagactttggagaatctttctgggactttttggagtcatggtgatacgagactctttgactctatgtgatgtctttctggaccgttcattgtgcaactttcctattccttctattatgcccatgcgagggatggaatatgataccctatattatgatataataggacagatcgcattttctaagatctgcccatcatggcgtgggggcttttccatgcttgtttcgtgggacttatcgaataataagagttggcaaaatgccagcccctaccccaattcaccgatgaggaaattgagccagtaatttgaaaatacattcgacgaccgactcctaagctcatttctatgcttgtttggtgtctggtggtgttttgcgaagtagtcgaccagcatcagtcagtctggtttatggcccatattgcatgtttttgtagaggaatttacgttcatgatgtgttcaaggcggtatatctgtgaaccaacctgcaagatcaggcaaatcaagtctcccaaggaatccaaactcttcctgtcccaaacttatctcatcccaagatgtaaaaggattgaattccatgttattgggttcgtgacggagattgtgttcgtctgatatcggctcagtaggctgcgatgacaaatcaagtgggttcagttgttgattgtccctttggtgcagctgagtggaaactaacgaggaaacaacaccaggccgacaagtagctatacaaaaattagcctgtacccagtgaagatctattactaaacaacaaacccgagtagttttgcattatatgttggtgcgtcacttgcaagaactgcaacgagttgcgggcagagagactgaacatggccataaaagctaagatctcttcgcacttgcgccaactcgcatccacgatttttgaatctacctgctccctaattgaatggcaggaatatgacattatcaggatgatccctgcagtggatgtgtctagcagatgttagttgacgatgaataacaatgagtggaatcgatcacgaacagaacccattgtaccaccatgcatcagttacgcttgttcgatatgtctcatgaacaagtgagaccagatctatggctgccatgacgcatgaggaggcacatttcgagaagactgaggagtatattatatttttctcgccgagctgtacatcagagcggcgtgatgctcgctcatcggagcagagttgagtaaacatggggcgatacaatagaaggcggaggtgaatgaatctaatttgtttttcttttagtcagaaattgtaactcaaaatcctagagatagaaacaagttacctcgcacgtaacacattctgctgacgcttgaaggttgatgcattgccaatgcctgagcgatgcaacgaaggttcatctgtccaattcaagggctggggtacgttagcctcataagcagcaagtttgtcgtcgagctccatcaacacatccaggctacaaagcttggagcttcgcagcgaactagtgcgagtgctatttgatcgactctgccaagcgttatagacctcggatagaatagactcgagaattttgtataattcaatagttgaaatgtggaacgtcatatatcccagcttatgatcgcagggttgtccactaagctcacaaggatcagcttcttgggagtccgttcccattgcaggcagaggcaacggtgaaatatgagaggtcatgctcggtctgccatgtgtcatgctaacaatcctaatctcatttgttagctgtgtgtttaaaaagaacagaaaagcgattgcacaaacatatccataatgacgcagctatgccatgttcgccgccgtatttctatttccagaggcttgttcgaggaatgtatgattgtctcgtgtaatccgagtccttgaccagctcgacacgccattccaactgcattccagcaccgattcggataaggagtactttgaagaagaagtgaaacaatcagaaacgtttgaaccacgccgatagtacttatgtccagaagatcaagattcacaaatcgctttgagcgaaggaaaaatgaataaaccgcagcctcccgatccgcaggcggaatatccgagaaatagcagccaatggcaaagatggcattgagtgcacaatggaagacaattgaattaggaccgcaatcaaatgcgcccccgagtccaatattgagctgtggcaactcaggcttggatgccttatccgattcccagagatttttatacgcttgctcaaaactagggcgatggaaaaatggaaatagacaatgtactctgtccaagtaacactcaagaagatggtctgccagagatcgagggggcaaagagaagtcgtcgaaccgaagatctaccgatgggtggcctatatctcgccaaatccccttatcagagccctgggatcttgacgattcactcttgttgcctcgcaaagctgacatatatgactgcaatggcatcgactctcctgctagtcgcataaaagaggccactgaagagttcccatagtattgctgctcctgtggagagtctgtgcctgggtcgtcttctgcgacagatattgcacccatggcggtgacattaccgtgggagttgagagacggcgaagcatatatgctgcctgctcgtgggtgggcagattcaggagacagatgtgaatgtgccgcatgtggggatctatagcgctcagcttccggtcgattcctcggcgtggggattcttggcggttgaaaagtaggcgttgaagaagacagaggacttggtccagatggcacaggggtggatcccagtcctagtaatccttccgcggcaacagatgcccttgattctacgtccagatccatatcttcaccgacaaggctttgacttgcagatgcccggtagtttttatgttgcgaaggcccaggtggcacagcaaccccgcctttcgcgcatgttgcttcaagctctcgaatacgatcatggagaatcttcaggtattcatcattgctggcggaccttgcattatccagcttgtaaacacattggtcaacagtatacgagcgtcgagcgcaggggccacaaattggcttgataccatcgcacctgacctttttatctcgacaagactcgcaagccagggcaatcttgcgacgccgcggtggctcccgtttattaattccacctttgggaggcatctgttcgacaagttgtcctataagccacagctgagtgtatgtgtgacccacaatattgctggtacacaattttattggtgacccgggtggtgaccggaagagaggagagaaaagcagtggaacaatcccgagactgttgttgtccggaatgtacccggacatatagtcacgtgtcataccccgcgaattaggaaaaccaaacactacgtccactactccgtagttacaacagagataaacacgccgattaaccctgagttgctataattggagtccttggtcagaattgttagaacggacaagaggaaggtcctaccgacaacgagatactgctaccctaatttagcttatttgtgtcccaattaggggtagtgattgtcggtgtcggcaggacctgtatcagacgtggagcgggatgcacccggtgtgtgctgagagatgaatagtgaaagtaaagaataatagtactactactccatcaatactccgcaaatatgtgcatatacaattaaagagcatagagaaaaatacagtaagtcaaattaggaacggatgtttcgtagtagaggacgcggatccgcaagtactatcccgggtgcatcccggaattgacgagggctgcctcattattaacgaggaaccttgcttgactgaaatattaggagaaatttgaccctcttcacttcctgaggtctctctttgattaaaaatccaaaatcaagtactgttacatcgtcttccacagaatcctaaaccaatatctaaaacccaaagtacaacatcggctggatacctgattatctttcacaattcaaacagcccattaccagtttggtatttaccacatctccgaatggaaaacgccaatcagacgattcaaaaggactatagtactctttcacattactgtccctggcaagacgacagacctcaaccaatctcccgagaccaatggcccgccgaagaaggtctacaatggggttcagatcccagtttctgctatcatggcttctctagtcccataggtacatggacagaggagcgcctggtccagaacctgatgcggaacatggctggtttgtgtaccgccatggacattgactttgatgttcccgaaagtatacatgagccatctcagaagaatctatcggaactggatggattcacactcccaatatttcagacctcgatggtcccacaaaatggaagaccctccgaaaccccatcgccatcttcatcctcgagccaagcccaaatgttctctttggatgatactgaatgtacacaacgggcgagctgtgtcaaagccagaacccagtccaaacaaaggaaaagaaagtgtgtgcaaaggccaggacagaatttatgccactgccgatcggaaaagaagaggagagagatcattggagatcgatataaagaactctgtcacattgtgccagggcttgagagacagtcatacacgagaaaatatgttctcgaggaggctgcactgtggattcaaaaattgattcaggacaacgttgcccttcatcaacaactaggggagttgaaggaacaggaaaagttgactcagttgaggttatttcctgtcgagaaagacgaacaggtgggctgctagtcctagcattatttttatctaacaatactgtcaatatctgcgcatgttcatttgatacctcacggaaccgagcactatttaatgtaatatgattagaggtctttcagtagtttatgttcgtgctatatttataccttaaacgccaggccattctctatctcactggtgttagttgatataaagaggccaacttctttctaggtttactattcactcttcatctctctctttgcctcttctttctcatcctctgtatattgaatataccatgccctagaatttcccaagaacatccatggcttagtgcctaccaaggaggagcaatggcagcaatccctttacccaatctctgaatttgcgcagcatagtacgtctaccaaactcgttagcaaaccgcctaaagcacccaaaagcaaaagaaaaaaacttacgctctcagccccagccccaataagaggcaacggcaagaaacgtgtataccacggaataggcgccttattcaagggcatccgcgcctcgtcgtcgccgacactctcatcaagcaacagacgcgggaacttcggatcaatagctgcaggccgcccaataccaacaagatcacaagcattatccttaatagcagcctctgccccagcacgcgtgcggaacccaccggtcaacataagcacaagctcaggatggcgctgtcgcacctccttcgagaactcgaggaagaaggcttcgcgcgctgcggtgcgtgacgattctggtgctgccggattggctttgccgtagcccatcatctttgggtcttcgtagctgccgcctgagatttccatgaagtcgatgccggcttcggctagaagtgcgatttgcgtcattgtttcttcgaagattgtggagctgtggtcggctgagtttagcttgatgccgattgcgaaggtcgcgggtacgactttgcgtgtttgagagaggatctctaggacaaagtgggcgcgcttttcgggtgtgccgccgtatgcgtctgtgcggaggtttgtctggggttatggttagtattggtgttgggctggtgataggggaaccgagtgtcataccttgccgttgaggaattgatctaaatagacgtaccattagcaaagaggttatacatttttttttaaaaaaacttaccaatcaaatacccatgcgcaccatgtagctcaatacccgaaaacccagcatccgccataagtctcgcggtatcaacaaactgacgaataaccctttcaatatcctgagttgtcatctccttgggctgggtccagaccaaacacccaatcagcttctcaaaatagctatctccaaccttcatgggcacggcgctgggcgcgagcgtctgcgcgaatattccgcgatgacctgcaaggcggaaggactgccggcctgggtggcagatctggactatggccggcgtgccgtgcttttggcaggtgtcggcatatttcttccattgcgcgacgagggagctgttggtttcgctgtccttatattcgctgtgtagagcagggtcgaagggactgcccatgtggttcacgtcgacttgcacgtttcctgctaagatgttagggttgggtgtcctttgggatatgttttgacagtctaggtttcgcgtttggcatagaagtttcgaccacaaaatgggagaattagaccttacctgtaagaatcatcccccatccaccgtccgaccattgctcatatgcatcaaccagggcgtttgtcggctggttagttttggcgatcatctcagccattgcggcctgggagatattagttccatttgtgcatagccgctaggcgtgaataacgtatgtgatttgtaccttgcctagcctattcggcagaacaagcccacaagggagcttgacggggtctgcgaggggagatggcatggcgtatatgtatcgtatgcgatcaatatatacagtgtaaggaattcagtctaatgtaattggcgatatagatgaagtctaacagacacaaaacacgctgttaatgacgttagtctcaatttgctcgcaactcaaaacgcacacatacctctattccagaacaagaatctgcaaaggaaggacaacagacactttcatcaatttgtaactaactagttaatgagaattagctcttagtcatctcgcggagagattgatctccccgtctcgcattgtggagtcttcaggggccgaggtccacgttgaagaaatgtggattgggaaattcggggagttgggttcatccgtcctgaattttcgagtctgcttggtatatttgacgctcagtgaggaacgccattactaacttagactggaacatgttgcgacctctacaggtgttggcgtaaagttgtgaacaagctaaatagtaggataatagtaagtgatattaaattttgttcattcatatggcaatgccagcgaaatgctaactattcccaagatgctaagacccccaaaatgcgagccaaaaaccaaaggaaataagtgttgggtattcaatcaggggaaaagaagttcgtgtccaacctgaaaataggcagagaagaaatgtaagaaacgaagtgcgctcgaaaccaacaaaagacaaaaggggggaaatatcaaaagtcaaaggtgacatgcgagtccatcacgcagagatcctaagcgctgacatattcgaacagatgcttttttttctgcaaaatgcagcatgcacagccaagtctaggacaaaaacaaaaagatcaaatcttacaacttggcattcttctcctcagttggggagccagtcgccgtgatgggtggcgagatcgttcctagattagagaggaggtggccgacctcgctctccagagcacggacctctgtgtgagggtcatacatgcgggccttgatccagttgtccagctcggcgtcgcccatagagcgcagcgcaatctcgcggtccaccttgtcctcctgggcagcgcgcatcaccttgcgggtgacgacgacactgacctcgcggatgcgggtgatatcggggtagagcaggccgcgctcgagctcctcgccggtgagggcagcggagagggcctcgccagaggcgtagatcatactgtctgtgacgcggacggccttggacaagatgctgcctaggccgataccagggaacacgtacatgttgttgccctggccggggtagtaggtgcgggtctcgccggcggagttggtgaaagtgtagttggggaagggggagccggaggcgaagaggcagcggccgtcggtgttggcgatggcagtctcaaagtcacactcggactgagaggaagggttggagagggggaagatgagaggggcggtgttccagtcagccatcttgcgcaggatctccggggtgaagacgccgcccatggtggagagacccatcaggatggagggcttgacgtagtcgatgacctcttcaagagtcttgtactgctcgccgttgttgtcaccgcgggcaaagtagaccttgtggtcggcgagcttgtcaccgcggtcagcggggggaannnnnnnnnnnnnnnnnnnnnnnnnnnnnnnnnnnnnnnnnnnnnnnnnnnnnnnnnnnnnnnnnnnnnnnnnnnnnnnnnnnnnnnnnnnnnnnnnnnnnnnnnnnnnnnnnnnnnnnnnnnnnnnnnnnnnnnnnnnnnnnnnnnnnnnnnnnnnnnnnnnnnnnnnnnnnnnnnnnnnnnnnnnnnnnnnnnnnnnnnnnnnnnnntcaccgcggtcagcggtgacaagacccttggtgtcgacaaggtagaagcagttgcgggcttcgtcctcagtcatgccttcgcgcatgaagaactcgacgatctggcgggcgacgccgacaccggcactgccagcgccgaagaacacggcacggtggtccttgcagggcagaccggagcgcttgacagcgttgatgataccgccaaggatgacagcgccagtaccctgtatgtcatcattgaaacaggtgtacatgtcacggtaccgccgaagagcagggaaggggttcttgaaatcctcgaattggatgacgatactagagatgcattgttagtcgcggtttccatataggacatgtgagaatgagtcacttacccgggccagcgctcggtaagagcagccatcagctcgtccaagaactcccgctcctcctcgggtgagatcttctcgcggcggctccccatgtacagcgggtcttcccggagggtcttgttaccagtgcccagatcgagagtcagaggcagggtgacctcgggacgaatacccgcacaggcggtgtaaagcgccaacttgccgatggggatacccatgccgttgatgcccagatcacccagtccgaggatgcgggagccatccgtgatacatgtgatctcgacgctaggttcaggccaattggcgatgaccgaagccagattcccgcgatcttcccagctcaggtacatacctaaaacgagcgttagcgtctccggttctatttcgtgcggagaagatgccaaatgcggagaagacctcagttatcgctgatacgtaccttcgggctgttggtaaatctcggaccaccgttggcaggcctcgcccaccactggggtatagatcaggggggtcatttcctgcagggattatggttaattttcgtcgccccaagatttcccggcccaatcacgtgtctcggtgcttgacgtaccctgagatggtctgtcaccagacggtaaaacaggtgcacattgttcttgcgcaaagtgctaaggtataggaatttttcgataggtgtgctcttcagacccagctgtgccaggcatcgggtcctttgcgtctcgtagctctcggtgcgaggaggcgtgaggccgtaggtgcggaggtacttgcggatgtatgcagggttggcggtatcgaagttggcgttactaagaactattagtgactgctttcttcattacaagcccgagacaggtaagctgatctgggtggacatacgcaggcaaggcatgattcacaaagggagccgaggtggtatgcgcccgttgctgagaaggatagggagccattgtgattgactgagaagacttcgagtttggggtagaagtggaatgatagaaagaagaaaaagatttgggagcagatgcgagtctgtttttatgtactcgagacagcatactaagattgcgctgggatgttcgtgcgcacatcatccaggagattccgacagggtgatgaccagataaataaccgggaccgcgtgtcaaggcgacacggtatagtaaaaaaataagagtcatgacttgaagtcggaaagagtcggacgaaggagagggtcacgacccatgtggattcattttcggtgttgacagcgaaccgttgtgcatgaaagccattctggaatctggatccctccaaaagctttttcgttttgctttttttttcttttcttttattcgggaagcagatccagcaaggagaagtgtatcaccgtgtggggaccgggggggggccgactccgacaaatgcggagatgcagtcaaatcagtgttgaatatggaattgaaagggcagaatcccgagttattgaatgagacacataatttactatggaaattacttggatgatcggtgcgggatttactcatcattccagccttgcggaactgcacctgtttgccctccatcctccgtacatatcgatattggggacgtgaggggattgggaaattggagtattcggagttggacatttacaatttacacggtagacctcgaactggtgacagctcccaagcagaatggtgactaaagaaagactgtaacctgattggctgcaaaagccggggatggaaacgccatcggtccaaacccacagctacgagcttctagagccgcagatagtgccgaagtggagtccaactctacccctaattgattctattcggtgtttgcgtttctcgtggaattgggatttcctcttgatttgaacttgagcgtcttcgacggtttcgagaaagcgatcaaatgccatttgagaatagaaggcggaggtcggcgacggagattgccgctctcaaaggtcatatgttgcgcacaaaacatcgctagatctataagataggaaaatgatattcgctgttccgatcggaagctccccggtgagacttttaggcctctgtttcgagtccgccgcgttggcgatgatattcggccttgtgaatggctctcggtcgccgacagagggatttttgattacttatgttctctagcacggttgcgttatttttatttttatttgccccctccaattcttcaattgtcaggtctggaaccacaagctttgtaacaattcggaatccagggatttcatatctcgtcaccgattggaccccttgtccgggtaacctgccagctctgtgtaacgcggaaagcttctattaataatattcattcctatgctctgctctacagtgtacatatggaatagttacggagtacggagtacatatctccgaactcgtcagggcttttccctgcagttcccaacgttgggacgggcttggaagggcttggctatctgccgcgtgggtgtacattatagaaatgaatgaatgcattagacatgtcattctgaattacggagtatatgaggcatatatgttcacatgcatattgtctcctttatacagatcaaggtctccctatatgaagtggtacgcagttcaaaagcgcggaatggataaatcgaggatcaaatgaagccaacatcgacatacatcgaaataagcccgatctaattggaactagtacgccgtatgtattgccatggttgcataggctacgtgaatggcccggctaaatccatagctttccccagatcgcggatcatcgatttttttacataatcgcttcattgcttcaattgcttcaattgttcaattgcttcagaatttcatatatcttgatcatttcttaattagtaaaatcttcaaaaaacattccggctttaatatacatacttcactagtaaaaagatctagcacaaagaacaaacatctacgtcacactgtacgggtgatgttgtcgtcatgtgctcaaaacaggttccccgagcttaactcctccctatagaacctcaaccttcattgagcttcatctacggagtactccgtacaaacattactattagctcacataatccagggcctattcaacatgccctccgagactgaacccctcctccctcgctacgaggatgacacctcccgtcagcgacacctccaccaaaagctacatagctaccaaatagtccgcgccatctccgagggctacatgccaacaactgaacaaaccatcgccaacctccgtacccttttggcttctgatgtgctcaacctgcgcaatcaagatataggcagcgacggtcgccaactagtgcgggacagtcgactgtggatccaggtctttatcgaatttctgcaacagaagaacagccaagaccagctccaggagtttttgtggcgcctggcccgttcgcgtgtcgaggtggatagagacaggctttcgagacaggccgcccacgtgaaggcgcgggcagatactaaagctggtgggtcgcgcatttccgcctctgcaactctccagcttccgggcttggcaaatgcaaattacaaactgatgatcgttcactaatccccgcgcgtagcatatgacagcttccgcactgtcgctggtctgctcctgaccaatgctgattttcgtcttttcgtcgatgacgtcgttaccgttggccgccaaatcttcgctgataccactgagtccctcgctgaatcttccaagctcgttgctgaacaagtcaagccgtccgaggaggaagagcaggcgctacagggccccggtgccgatgaggggcatgcgctatcgaaggccgaggtggaggaggaagttgcacatgtcgcggatgtgaccagcaaagggatcgctcagacgacccatgacgctgtccagagcgctaaggagcacatgtcgggccgagagagggacacattgctattccgactgaagcaggcggttcaaaagcttcgggagagaacggactactctgactcggtggcgacacttgctcaattggtatcacgctatgctaagatctacgcggatgtagcagaggatactgcttcacttgcccaagaagacctggaattcaatgctgacctcaagcgggcggtcgacgaattctggattctcttgcggtccttcggtagcgcagaagagtgggatcggctacaggagaagttccacaatgtcttgcgtcatgcaaacaaagatcccgagtttgatgatctactcggagaggtcggaacttcgttgcaggaaatgctcaccaaccccgagttcttcgactcggcgccgcagaagctcgataaactcaagcaacactctgacaaaataggctcggaaacgggcctgcgaaaagatgtggacgaatttttagcacagaccaagcgcacactgagaaccgtgccggaagacccagccgtctccaagttaatcaacgccacgaagaaggtgtaccacggcgcttggggcgcctataataacaaaaaggccgacctcccagcagaattggtgaacgtcttcctcccagtgctcctccgagcaatccaatatatcccaatcccccgcctagagatctcggctccagaaatggacctcctcctcgagaacctagttcttgaacccggccacacagtaaacttctcctccttcctcccctaccgcatgcatctcctcacgcgcaatgacatcgacgtggtgaaaacccattccaagcgcacagaaacactcatgaaaacagccttcacagtcaccgtccagggcctaaacatcagcgccgaagacttcggctactggttccgcacccacacaggcttcttccacctgaaggacgaaggcatagcaagcttcttcctagaccgccgcggtatcgacatctccctagacattgaagtgggccgcggcaggctggagcagatcttctctttgcgtggagttcgcgtctgtatccacaaactcgactacacggtcaagcgtagcaagtggagattcctcttatggcttaccaagccattgctaaagcacctcgtccggcgtgtgctagagaagaagattgcagaggagattgttgcagcgacatttgcgctgaatcgtgagctagtctttgcccgtgagcggctgcgtgctgcgcgcatcgctaacccgcacgatctggccacgttcgtgcgggctgtcctcgcgcgccttaaacccgctgactcggacgtcgaggctagaattggtcttgagccgctgaataagggtgtctttaggggtgtttatgctcctggaagtattgtcaagacctggaatgaggaggctacaggtgcacaggaggctattgagaatggggatgagacgcatgggcttggtcatacctggcgtaatgatatctttaatgtttccgggcactaattgtgttacttatctgatttaggtgtttgggggagttgctctacttaattacagcgtgtttatgattttatgatgaatccgaactatcaccggatgttaacccgtgctcggtgcttttgttttccgttctaatgctcatctcttgcttccttttgatcacataatactctactaaattaagagtcctaatcgagtctaatattgttgtaggggtagtaaaacatacgggtatcttctacccaggtccttctttgaaaaacactccaatttctctagattgatctcctatttggacgcagtataggtgaccttaggagtaacaccaatgattagggtgagcaaaatataaaaagaccacgagattcggcttttcggctgctccgcaacgaggaaagggattgaaggcttcgaggtagatagcgctacatatttgtcttggccatgtgtaaggacaaattccctttatataactaggaaaaataccagacgttcttaaacagcgatttcgccattcacttacataaagccatcatagatcatacaagctcgggtacctactcatccaatccgaacaataattttagatcctctattatataggaattaactgtgggagacgacaaacaggctgcttgtaggccatattactatccttgctgtcggactcgaagttatccaaaagcaagaaggcatacacatattccagctttgtacatcgatgtatatctatgctgtagataattgagcagcagacaatgtaaccaaataaagctgcaccataaatgaataaaactctcgatgatattcagatgttctctggtcaaaagctagtactcgttcatattgtactcaacatcactcatcgttcattggttgaccacactcacacgtgacacggctaaacattgttcctcttttaggccacctaatgtagatctaagcattggagctgcggagcaaacatctccaatctctaattctttattcgaagaacaccagtgacacgagcgagtgcattctccatgttgattaattaaatattacaacaaatccaccaaacctttagcttgtcgaagcttcacctacctacatacctcggtctacacaaacacaaaagctccacatctctccgagcgcacgagcagctgctcgcgcagctccgctgaaatgcaattattacgactcctggtcacactagctgtagtgctattctcagttgttgtaatcgctgctgaggattactacaaggtgcttggtctcgcgaagtccgcgtcggagagggacatcaagcgcgcatacagaacactaagcaagaaataccaccctgacaagaatccgtgagtggagctactattctcttatctctattttcatgctttcatttctctacgtggctcgcacattacactcgcacaaggcaattgctaaccttcctcgcagcggcgatgacacagcgcgcgaaaaatttgtcgaaatagcagacgcctacgatgtgctttcgaccaccacgctgcgcaaagtgtacgaccaatatggccacgaaggggtggagcagcaccgcaagggcggagcggccggcggcggcggccacgatccattcgatctgttttcgcgattcttcggcgggggtggacactccggtcacgcgcctggacaccgccgcggaccggacatggaagtgcgagcggcgctaccgctgcgggatttctacaatgggcgcgagatcaacttcctcgtggagaagcagcagatttgcgattcgtgtgagggaacgggatccaaggatcgacaggttgtgacttgtgatcggtgcgcagggcgtggtatcgttattcagaaacatatgcttgcgccggggatgttccagcaagtgcagatgcagtgtgacaagtgtcatgggcagggaaagaagattaagaatccttgtcctgtttgtgaggggaatcgggtcgttaggaatcaggttgagactagtgctactattgagccggggatggggaaggggactaggcttgtttttgagaatgaagctgatgagagtccggactggattgctggggatttgattgttgttttggatgagaaagagcccgagcttggagagtcggaggaggagaggacagatgggacgtttttccggcggaaggggaaggatctgttctggaaggagagtctttcgctgcgcgaggcgtggatgggtgactggagtcgcaatcttacgcattttgatgggcacattgttcgtcttggacgtggtcgtggtgaggtcgtgcagccattggctgtcgagactattgccggggagggcatgccgcattactccgagggtcatttacatgatcaccatgaagagaatgatgaagcgggcaatctgtttattgagtatactgttgtcctgccagatcagatggagagtgggatggagaaggacttccatgctctttgggagaagtggcgcaagaagattggagttgatttggcggaggactctgggcgaccggttgtgcctccgccggcggaggataaggatgagctgtgatgattgcgtttccaagccttgttcatttttgattcccttttctttctatggtcattgtatattgattgcatctgttgatttgcgtgcattttacggctatgggctggattagattagacccttggcttgtattaaaatgttggatatgatatacaatagacacggcctgaaccctacaagctaggggtctgctttttttgatttgaaataaaattggagacaatccaattggaccattggtttgaactttgtcgtcatacgtgactcaatttaaagccaaagttcttctgcggacttctcgcttcaatcgatacacgtggggcgacgaggatactgttcatgccgccttaatgccagatggagatcgacgatctggaagatccggccgggacacagttctatacccaatgcacgagactccagattctgattctacctgacactgtttggtcgcgatgcatacccctcgtatgaggggttttatggcgcaggacgtaaacaaagaaaggcgtacagcgcatagatctatggcgatggtctaactggaataggccttgaatgacaggggtatagaacaggggttggaggttgtagcgaatgagcttagtttacctcggactacacaaattccacttccttgaccgtcatttcatgttcgtgttcaatgtgactgatatcaatgtgtcggatgttcgtttgaaggttcggctaggtgctctctccatgtgcaagcatccacttcgcgggtacaggctctgtttgggctttggagagttggctgttcctatttattgcatcagatttgggttatttcataaaattccttagtctaattccgtgggccccattttatgccctatgtgttgttgctttggggacatcttcaggacgagtttcaataaggaccgaaacatacattgtcccttcactaacacaatagacctaggatctctgattcagtatccatatccccttagtactccatggaaacacgccaaacgggtcagggatgggaataaagtgtaatcaatctgtcaaagtttcgcccgtaaagccaaaagttgaaacgattgagaattctccacaagcctcatcccgccctatgcgaagtaaatatccctaaaaatcagctacaacccgagatttcaacctatcggatggccttacaatataggcaaggatagacacagccacctcgtacgaactacctgaggatctacaaaccttaggtagactagattagactacaacacacagttcgtgcaatctgatagggctagtgaatggtttgccagcatcgtatttcaagctgcagtccctgcctctaacttggtgggtctatatgtaccccgtatgacggttgtcgtatgcgtatgcatcatgcactatctttaatttgggaaaacccactatatgcaatgagactaaatgggggaaatatccaatacatactgtccacgttgaggagaaggtgcctagatgcagctataaacagactttggtgagactgatggatggcacgcggattcggaatctaggccggacagacgcggtttgccttcggatagtgtcatagtacgataggaaatgcaaaggggcgcatacggaagcactagtgacaatgccgtcagaaaaggattggtcaatcacgtcgatatatccaaagtttgatggattcaagtgcgttgtagcaactcttttcgtggagcggcgtgtaccgtgcatagtgcatcaaagaaagctacggatattgcttcaaaagctccagttgtggagctcgtgaaccacggaatcatgttcttcgcccacactgccgtgtgttatctcttttcttaactagtaaaacccaaggggctggctgagggggttcaaacagatatatcggctatagcgggttgcggtgtgggattgtggtgatttacgatctaatataatcatttgatttactatgtcatgcttcaatttagtactttgatagatttacaatttaaagggtatagtacagaatagggttgtgctagctccctaaagtgaaagtagattagatccatcaacttatacccatcttgcctttttgtgaacgattaactgtacagctttgaatagacgaagggtctcactataattatgaatgctgtgtatgttataagtacattttaacccggggctgatctcctgcagaaatacagggaaaatatgctgtaagacggcttaatattccacagaagtttctagggcaaacgggcgaatggtaatctcatatctatagagtcctagtatcaggataaccaatcagcagtgcatattttagcgtttcaacgcaagaaaagagccaaatgccgaatttgatagcgatcgacaaacgttagcctacaggctctggtaacggcaatgcgtagacctagcgtctaggatttgatttgatggccttgcatccaacctattggttcggtagtactctaaggttcgtatatatgtaaccatctatatctggaaatatgtatatacgcccattattggtataggaaactgatggtattcatatgacaatggttcacttaagatagcatcacaaataaatcatacttaccaaaatacatctatgtgtaggccaatcatgcctatagatagcatagatttgcggttcactgggaaaagtatatacaaaggtacatataggaatagcaagcatgaaagcccttgattttccaaatataccaacaagcgtgctatccactattttaatgaacacagctaaaataggaaacccgcgaaatcagtaaaaattcgtacccaccggccagactgccaatctcgggtttccaatggtgctttgagctccctcgtatgccttcattggcgtggttccgcatcgaggttgatatatgaagaggaggtatgggttcttgtttgctatcaaaattctctttcgtctcaatcatcagctatcttatattctcactctatctttacttgatctcttaccccatcagtgttcataccttcttgtttatacttcttcctcatacctcactcttcgtctaccttccatctcttctagacccggacttattgctatattaacgatatcttatctgtatcggaagatgcgtcccctctcgctgaagacaggctccagtggcgatggagccatgccttctgatgctctggaacccatcgctatcattggcctagccacccactttccaaagcaagcaacaaccactgagggtctgtgggagcttctcctacaggcccgctcgacgtggtcatcgatacccaaagaacgcttcaactcagatgccttctatcatccagatcccgagcatggtggaacggtaagtcatacccgagctatgacagaccaacatcaacatgaataatcggttaacagatatctgtctagtttcatgtccaaggaggtcactacctctcagaagaccccgcctacttcgatggctccttcttcaatattaccaagaatgagctcctgacattggatccgcagcagcggctggtactcgaaaatgtctaccatgccttggaaaatgctggcattccattgaccagtgctgttggctctaacacatcggtttttgttagtggattcaaccatgactacctaggtatcctcaattcagacccagaaaccactttgaaatacaaacccaccggtgtcaccaatgccattctgtctaaccgtgtcagttggttctttgacttcagaggacccagcatgaccattgatacggcttgttctagtagcttggtggcactgcacctcgctgtacagagcttacgtgccaatgagacaattatggtatgttaccatataccttgtgttgatattgatactatgctgataatatgctgataacgtttaaggctgtcgtcagtggtgtgagcattcttgaaaaccccgcggaaaccatcggcatgagtcaccatggtttgttgggacctcaagggcgatctttcagcttcgactcccgtgccgaaggctatgcgcgaggcgaaggcgtgggcacagttgtagtgaagcctttgagtgtcgctatcagagatggagataccatccgtgcggtcattcgagagacgggagtcaaccaggatggccgcacgccagggattacagttcctagcgcagatgcccaagaaagactaatccgtgaggtctactggagagccggcctggacctcgaacacacaagattcgttgaagcccatggcactggaacaagcaccggtgaccctatcgaagcgggcgctcttgcaagagcattcaaatgtcgccgagagactccgctttacgtcggggcgatcaaatcttccattgggcatctggaaggtggctcaggtgtggcaagcctcatcaaatctattctaatacttgagtctgggattatacctgcaaactttgatatgaagcagacaaattcctctattcctgcaactgagtacgatattgcattccctaccgaggctcttccatggccatctccgggcctgcgaagagtgtcagtcaactcatttggaattggtggcaccaatgctcactgcatccttgatgacgcctaccactatctgaatgaccaccgccttacaggcgcccaccgcaccacatccactgttcctacaacacagaaaatcaacagccggctcttggccctgtgtcgaacaggaacggaatcaaaccatttcgtgacggattcattcgatgacagcgatcactctggacatggtaatacctttatggacacacccacaagcgatggcttttgtgaatcaccaacattcgcatcatccacatacactagcttgatcgaaaaaccaaagctgttcttactctcgacttttgacgaagatggcgtcaagcggaacgcagctgaattagccaagtacttgaaccgaagaatgatgaagtcagtcctccatgactatctccttgatgacctgtccttcaccctgtcgaagaaacgatcccattttccctggaggagcttcgtcatggcatcctcagtcaaagaactcgcatggaacctgtcagaagcgaattttgccaagccaattagaactgccagagttccggaggttgaatttgttttcactggccaaggagctcagtatcaggctatgggccgagagctcatggtctatcctgtatttcaagagtccgtggaggaagcatcggactatatccggcggctcggtagtccgtggtcgctacttggtaatcattttcttgcctcttttgtctaatgtgcttgactaacgtatcacagacgaactcttgactgaaagacagtcaccccgagtcaacttgcctgagatagctcatccgctgtgcacagtcttgcaaattgcgctcgtggatcttctgaccagttggggaatcttcccaaaacgtgtaacgggtcactcatccggcgagatagccgccgcttactgctctggcaagctatcccgcgaaggttcttggaaggttgcatactatcgtggatacgtatcatccaaacagctttccgcaaatggagctatgatggccgtgggcctggatgcatcgcaactgcaaccttatctggactctgtgaggaaggacaacgccggggagctcatcatcgcctgccgcaacagtcccaaaaacaacaccgtttctggagacgaagctatgatcgactgcctcaagagtcttctcgatgctgatgccatctttgctcgaaagttgaacgtcaagaatgcttatcactcggcccacatgcatgcgatcgctcaggattaccttagtctaatgggaatgctttcttttggaaggcggctggcagctccacatcaagtgcatatgttttccaccgtcacaggacaacaagtccaagaggaacacctgcctgcacaatactgggtggacaatatggtttctcctgttcttttcacaagcgggttggttgcaatgacctcaaaccaaatttccagtcatgactcgattgattccacggattctctgcgccttatcgtggaaatagggcctcacacaacccttcagagtgccatcaaagagacattggcctcgaagagccccaagttggaatttaagtacctagccgttctcaaacggacagatcacagcctcaacactctactaactacagtcggcttcctaggttcaagtggatgtgaactagatcttcatgctgtgaaccaaggttcttgcttcaaggcaagaagacggcccagactgttggtggacctgccgccatacagcttcaaacataccgagaagattttatttgagtctcgactgagcaagaatctgcgaactcgaaagttccctcgtcatgacctcttcggtgcacctatcacggattggaatcctacagccccaagatggagacattttgtccgattgaacgaaaacccttggttaagggatcatgtggtaagttcgaagttgtctccaaaatagcctcactcattgacacagcctaggtcactggaaactatgtctatcctggtgtgggttatttgatcatggcaattgaagcatcgaggcagttggtcggcgaggcaaagatcattggtttccaactacgaaaagtcaacatccgaagagccttgattgtacccgataccaaagaaggaattgaggtttccttggcaatggcaactgtcgaagactcgtcatcgtcgcgaacgtggaggcgattccagataacttcctacaatgcatcgagcgaccagtggacagaacattgcactggttacatcaccgtcgaccacgaaacagctttcgatccaattgacaatggccgcgaagcagaagaagaaagccgagcattagaatccgaacttttccgcgcaaatgagacatgcgcaaaatccatggctttcaaatccacatacaacaacctccaaacatccggcctcaattttggtcctttgttccgaaacctcggagacgttcgcgcaagtgcctgtggacttggtaaggttgttggatcagttacagtcccggacattgcacagtctatgccaaagcagtatctacattctcatctcatccaccctgccacaatggacagcatgatccacttgatgatcgcggctgttctcgactttaccggaaagtccaccctggatcagatcagattgccgactttcatacgcaatgtctgggtatcagcagatttgaattcagccccagcccacaaattcacaggacatgcaaccgtgtctatggtgggatctgataaatttgagggccaaattcaaatgctggatgaggaaacaaacacacttcgcatccgcatggacggtattgagctcactccactggagtctggtcttgctgaaagtagtgagcgaaaattgtgcagcgcaattgaattcaagcccgacctccatttcatcgactcaaaatcggcctgtgcactaacttctctcaatgctaccgatgacactgaggctttgtactgggtaaagcgtcttcagcttgcaacgatgctctacgtcatggatgcactggacgagctcaaggatattgatgccatgaaactcgatttgcacatgcgaagattctttgactggatggagcatatgcaaggattgctcgagcgcaatgaaataatacatctgccctacagtgaattccaatgcgcttttcaagacgaggctctcaaggaagccattggcaaggaaatcgaggcccacagcgccgaaggcgccatcacagcccgaatgggccgcaatattgctcaagtcgtgctccaggagactgatcctctgcatctcatgtttggtcaagacgctgtgatggaacaggtgtacaaggaaggccttcacttgtataacctgccgcagcatctacagagccacttgtctctcctccggcaccagcattccgagctgaacattctcgagattggtggtggcaccggcagcttcactgctgaagtcttggccgtcctttctccagaccttgcgaagaacaaaggaagcattgccagttacacattcaccgacatttcatccggcttcttcgagaaagcaaaacagcgtttccaagcatggtccgacatcatgaacttccaatcgctcaatatcgagcgaagccctgtcgatcagggacttcagctagggacatatgacttaatattcgctggcaatgtcatccacgctactgcaaacttgcagaacgcattgcagaacctgcgatctctattgaagccgggtggtcagctcatcatgcaggaagggatccgacaggacttcctgtggtacccacttgttttcggtcagcttccagggtggtggctaggcgatgagccatgtcgccagtggtgtccctacatcccggctgaagaatggaatcctgtgctgctgaaagcgggattctcaggaattgatgtcgagtatcccagttcgaacgatccagatttgacatggcagagtattctggtttcttctgccatcgaaacacccaaggagaagtcatctaatactgcggttatcttgacgttcggtacattgagatccgaacaagtcattaaagacctccaaggtcttctgccggaattgggatacacgaatatccttgttaaggagcctgcagatgtgaaaaattatatcctgcctgatgcacttttcgtgtcattgatggacttggagtctccttacctgttcgatatggacgaagcggaataccacacactcaagaagatgctcagcgagtgccaaaatctactgtgggtgacatgcaatcctctcatacagccacacgcaagtatgagcattggtcttctccgaacagtgcgctgggagcgggatgccgatggctcaaatatcgtcaccctgacagaggcggagcctgacatcacttcgccaaagagccttgctacagctatcggcaagattgtccagcggcaatttgtggacaacccggagaatgatcgccacgccgagtacatgttgcagaatgatctcatacacattggccgtttgaacgagtgggaggcggcagatcagtttcttgctgcacaatcctctcagcaagctcctcctcaacttcaacgcctcggtgattatgatcatcccattgagttgcaggagactgctgttagcaccagcgaataccactgggtcatagataaggaacatgagacaccgcaaaaagacaccgaggtcgagattgagattcgagcaattggtctctcttcgaatgtttatgccgaccgcctcgcgaatgaggttgctggtgttgtgaccaaggttgggcctgaagtcgaaggcccggccccgggtgacagagtcatttacatctcaggcgacaaaaagggtggttgtatccgaacacatggtcgagctgaccaaatgcagctcgtgaagatccccgatgagatttcattcgaagtcgcggccggtttggcttgggcatacgcgacagcaatccaaggactcggggagatagctcatctggcacccgagaacactatcctgatccataccagtgtaacggatatcagtcaagcggccattcaatatgcccagatgatcggagctacaatctacgctactgtagcaaccgtcgaggaacgtgatttgctggtctctaactacggtatatcccaagaccgtatcttttccaggagggatctgagcttcatcaagggtattatgcggtgcacaaacaatactggggttgacgtcgtcttcaacgcactgagcggcgaggcactccgggggtcaacggcatgcctcgctccatttggggcatttgttcatgtgtcgaatctagatctgcgagctgatactacaattgagctagcctctttacctcgcaatgtgagcgtctacaccgtcgacattcctttactggctcaacatcgaccaaaatcggttcgtcttctgctcatcgaggcactgagactgtactccgcaaaaaggatcggtcaactccacacaactgtcatggactttactcggatcaaagagggtattcaaactgcgcatagcggagaagcagcaaaagttgtgattacacctgatccgtccaacatggtccctatggtcccacgacctctccagccttgtcactttgatccacgcgcctcgtacgttcttgccggtggctacggcggcttaggccgaagtttagcacgatgtatggcatctcgtggtgcaaagagcctgattatcctatctcgctcatcagcttcaagctcagagaaaatggaattgattggcgatctcgatagaatgggatgcaaggtccattcactgatctgcgatgtggccgacctctctaacctccaacaattgtccagagcagccttttctaacttaccggctatcaaaggatgcatccaagcatccatggtcctgcgggtaagtccccggtcctcactcctcggtactaaatatacacaaactaacatattcgtaggatggcgccttcgccggactctctttcgatgactggaaagcagccattagacccaaagtccaaggttcctggaacctgcacacagtcctaccggacagcatggacttcttcattatgctctcctcagtcgcaggcatcttcggcaaccgcgggcagtcaaattacgccgcaggcaataccttccaagacgcacttgccgcataccgtgtttcgaaaggcatgcatgcagctagcatcaacctaggcagtgtatcgaacgtgggctgggtagccgagaaccgaaactcgatgcgcacgcacacagccacgttattcgagcttttgcgcgaagaagaggtccacgcaacggttgacttccttatccgcgatcagcaagacggcggaaatgcatcaccgcgctcacagctcatcctcggtctgccgaccgcggagatgtgtcgccagaacggagtgcctttacctacgtacctgaattactcgatgttcacgcacttccgtaacacggcgacagcgaagagcagtgaggtgtctctgcagaagactgtcagcactgctgcgcttttgtcggcggcttctggcttcgagagtgctgtcgttgttgtgtcggatgggattgttgagagacttgcttcgctgcttgccattccttgttccgaactcgatgcacagcgctttagctttggcggcattgactcccttgttgctatggagtttcgcgcgtggatcatcaaggagcttaaggctgaggtttctttgcttgatattatgggagcggagaatattagggctttgagtgaaaagattgccggcaggagtcgtttaattggagggtctggtgcttaattttccgcgtggtttacttatctttctttttttttacgaatcttctggggattatctttcgatactgattagcgttgagctctcgtggtttattgatttcacgtctgatgccccgttacgagatatgatcattctgcatctttctcttaggacattttccaatctctttttggttcatacactttaagactagattcactaacagaatgcctatgagcatttctacacagtttacatcggaaaagatttaaagatttgataaatgcgatacttcaattttgtccacctgagtcactctttgcgaatccatttcgacttattaatagtaggaatatgccatgcttgcattaaagaaaaatagctcatcgaaaccctaaactttccatccgttattcattatattcgtcaacacctaccgtgcagacccggaggggaaataaccccgtaagccctgtccaggaaatgtacaaacagccaacttgggctcagccccggatcgctcatgatgccacgcacgctcacgtaaggccaaataaaccgagcggaacggctggaggtcgccaggtagtcgagcaggcggtttacgaggatcgaagcccagctgctgaagttgcgcctcacaccaatgcagggtgtccgccggtaaatattgctctgtgtcgtagtcggtgtgattctgttgcatggcctgcagcgtcgcgatgtcggctgcgaggccaaagttctctacgcccttgggcgggtggtggtagttcatatagggttttccaggggcgcgctctgggtggtctgcttgtttgcgaatgttgtggatgttccaagtttggacgtatgatttgatatgggagcggagagtgggcatgtagattgcgaagagggcaacctgttcagggattaatgttgatgagaagaggccttcgttgtgaagttcgcggaaatagttctagttgaggtcagtattctgcgaataggtgtaggataaacctgccaaagttgactaacatgatacagtgttactactgatttagcaagctgggcccaccaagattcaatccggtgggtatctgtggcacgtccgggtgcgcagcattgctcacgcaggacatccggctcagtgacgcgacggagtgcaaagtgagcatcggctaaaaggggaacctcagactcgaggtcagatcgaagagtccgtggttggcgatttttagaagcaacagtctcaagatggtttttgaggacacccacggccgtgtgcgcatccacgccaacatgaatccagagaacatatcgagaataagaatcgagctcagcaaaaatgcggaacccgaaattggccagctttgagtacccattcacgtgccaggtcagattaggcccggctagaatctttggcgggggaggacgccggggcacatcactggtgcggcgttcaactgtatccgggcgcagcatgcggtagacactatagagacgatcgcgggcaaatacatgccccttgcttcggaagtggttgtgcaatagttcctttccgtacccctcaatggtccccttgtccatttcctcggtcagggcgtcgaggatctcctgaacctgtgcttgttgttgtgcaggcgagtcgaggcggagacggatgccgagctggtgacgaagtctgcggagtgtgcggtgggagacctcataaccctcatcgtgtagaacggtgacgatctcttggtcggacaagcccacgtcgaagaaaagatttttgatgcgggcatgaagcgcttcattggaggagttgttctccatctttttcttgacgccccatagctgtaggcgtttggtcagagtacgcgacgatatttgaatatcatgctgcctcttcaggtgcttgcaaatgtcgtcacctttcattttcttttcgaacaggccgatgatttcggctttgtacggctcaagatccacccgaggacgacctgacattttacttggcgtatcaactggattctccattttgcgaattcagaccaactaatgttgataagaattagcctggagaagatgttcgtggctggggaaatgcgggcggtgtgctgagacctaccggcagaaatcgaccgccttgatttttttgttatcgcagcggttcttctcgagaaacaacgtcctcgctctgctcagtcattctcgatatatttttcggtttaatcttgtactactgatacgggctttacaatggtccgtgaactcaagcaccatgagaagaagtacgtccgcacctataattaattacccgcgcagaaatctcaatccgatcccatccaacattttgaaagcttcaagataccacaaaagatcaaaagctaacactgaaacccctgcagacttctccggaaggtcgacttccacaactacaagtcagatggcaatcaccgcgaacatgaaattcggcaacgataccttctccaagacccaatggactaccgcaaatacaacgcgctctgcggttctctgcgtcagctcgcacacaagctctcccagctagacccggacgcggacccgctgcgcaagaagctcgaatccgagttgctggagaagctatggcggatgggaatcctgaagcagtcccgcgagcagggcgccggtttgtccaaggttgagcgcgatgttacagtttccgcattgtgccgtcgtagattggctgtcttcatggtgcgctctggcatggttgagactatcaaggctgtaagttgcgtggggatttggtttggggtggattttatgctgacgattgtttcgctaggctactactttcatcgagcagggccatgtccgtgtcggtacggaggtcgtcaatgatcctgctttcttggttacccgcaacatggaggacttcgtcacctgggttgattccagtaagatcaagcgcaacatcttgcgttaccgtgagaagctggatgactttgatcttctatgatctgccccgttaaaaaagcattttgggtttttgttctgatatacccggcgcttgtgcattgtggcctgtttaggtttggcgtattgatgtttcatgaaatgatatctcatgtccaaagttctctggataactcaatatggatatgaatactacctatgttctcgagaaacgtagagacctgcaagcgcttattgtgtcgttcaccgaaggtgctcgccttctattccccgagctaccaggatttgatattgaaggttatatgatggctccacgtcactttcgcatcgttgcccatgctatgcaaatgcgataactaatctttttgctctcttgctatcagttcacatccatctacggagtacgcaggtgggaaaccaccattttgaggtagacttgggcccaatccgagtcttcatcttcttgcccacatcatctctaatcccagattccggaaggaaaataaatgtctgtacttccacgattcaggcgttgttcgacttaacgtatactactttcacaatatttccttcgcttgaggcatttgaggtctattgcgatacacgggacggcgaatctcgagtctggcacgacgttaataatgttgacacagacacagaatatggctattgagtcagatcgtatgttgattggtttacgcggccggatttgagcttgtgtggttttctatgcagaaaagcaactctgaacctcgttttcagaagttacatcaggttggttttctcgcttttaccgcatcgagagcaactctcaattccattatcatcaccatcatctctcactctgttcctcggtcaccgattacctattctcgtggacactctattcatgcataatgaacaaagggcaagtggcagggtgctcaggtgatgatcggtgacgcttaggtagtagcaaagcaggattatctaggtaatgagcagttacctttgaaagtcagggtactcaggtgcacaattttactcggtcgagagacgataagagcagcactagatcaaaaggagcaatgtttccagtactagacattatctgttacataagtaccgtataaggctatgtacagtgttccaataataataggggtatatcagtcttcaaaaaataacatgagcaacgcaaggaatgcaaaagggactggaattcaaaataggccagaggctcccgcgaagaaagaaggttgaacggcgggatgggaaccactggatgcaaatgcagatcatcactcggtgatcatggtatcatagggaaagcagctgaggcagggtatgtttgtgagcagcacctgtgcaaggctctgtgggggtaacaagggagtagtgatggttgaatttaggcattaggaagaggagaagacttcgaacgaagacatgtccaacgtcttcgagctccatcaggtgaatttgaattcaagctggtttttcccaagagctccaagagctgggcctgcggatttccttgagaatccgattccggctcttcatcttcggggatatccatacggaaccgacgcacgctgccttcgcgctcagtcttgccttcctcgaagaacggggtgcgcgagtcgcgggactggaagcagcgaggcgcgacgcggcgccagagaccccggacaccactgctcgcacggtcaatcttttcatattcacgccgccgggtatctggtgaggtccattccattactgtcgccgggacgtggatggacgaggacgatgggctgcggtggtgactgctgggtaaggtgtttgatcgatctcttggtgtgatgaagtggggtgcgctcgtcgaggttggtgaagtggactctatcccgaagcggatgctggaatatgaatgtctgactggagacgacggttccgagctgcctttctctgttgatatgcggctctcgcgttgaggcctgtacgtagctgatgctgtccggtatagagaaagtcttgtctcggtcgagggtctgttcgattcatcttgaaacagacgacatgactcccggtgtaacgctatcagtgactcgcgcttatcctgcatggaactgcgagctgaggtgacaggcacgatggcggcgttgggcacagctcggcgcgaatgcaaggaactgcggcggctgtttggtcgcgatcgcacagtgctgcgggatgccgagcgggagtgactgatcgaagtagatgtcgatgctcgtgattcttgacgaccgagctcgtttcccggtggatcgatccttttcaccttggccatctcagatggggacttgggcgagtcacatcccttgagctctgtgacagtggactcgcacttagaaatagacagagatggctgcagggccaggcatgtgacggaggtcatttcccgtcgggaaacttctgatcatatgcaaatataggcaggtgccctgattgctcagatgtatacatgtatcgaggggaagttcatgtggataagattagggttaatatatatttaaaggagaacacgactgcatctagaacataaaagagaagcaaaatggaactcgacaagcgaacctctttccttttattaatccaacatgcgcacaccgctcctcaactattttagcggagtgggggggcgtctaaagatcgtcgctatgagggcgtctagccagttacttgcagttacaaatgcaggggctttattgcgggagagtatgggggaggggtaggctacggttttttatagtcgcagtgctaacaatatatatagatagtaagtctatataaaggaagacagactattcacaacatggtcgcattgctaatctaggaaccctgtttgcacgattatagtattcggtcaataatcgaggccatattaaatataccaactgcactaactgcactagttaactgcactaactgccctaattaaggagaactactccgtacactaacctatgatagacatcgcatcctgcatgcgtgttgggacaccgccagaccccctagtttcaacaagatctacaaaagacggagaataaatagtatatactttgaagagaatgcaataaaaacttgaaagcgattgtctagaatcatctttgactttgtttaaagagaataaaggaactcggggttctcccgatctgtcaaatcaaggaatctgcagccaaagttagcagaagttggcaaacgttaactaataaatcactcactcttggttctctagtctcacatattctgggtgagcaatgaaaaggatcttcttctggttctcacgacgataccacatccagaccccgaccagcaggaataaacacacgccccaacagacgataatggtcacctcggcggggacatagcggggagcgtccttcgggcggaaggtttgtggacctggaaattgtgttagcgtgtgctcgccacgttttgacccctgtcttctcctgattttcttaccgatgatatttccaacgcaatatccaatcagatacaaagcagccacggtagtcttcttggtatatcccgcgacattggaagaaatcagcgatagcaatgccacgaaaggggtcggactggcttgtgtgaggtaatagccaatcaaacgaccgacattgttagataggggcagagcgacaatgagcagcatccctacgattgcagcgactaacccacccaaactggcgaggatgcgctgcccggtgatctgtccgacatagccgttgattaatagtgcaacgatttccactgcgccgccggggacacccagaatcagactctccttcgcgttatatccgaagcttgtaatctggactggtcagcatgcttggaatcttcaggtctttataagctattatcaacataccaactgactgaagaaattggaaatacccccatttggaatatcggcaatcaaggcataaaagaagaaagcccaggtcatcggatccaaaagcgcctccttgacctgatatagcttgaagtgcttattaccaatgccttgttggttgacccgcacgcgggcaacagccaagatgcgatcttcttcatttaaccagcgtgcattgagttggttatctggcacaatccagaggaataccagtcccaggcagatggtgaggagaccagtgacgaggaaaataatcttccatggctcgatggccgacccgtgtttctcggcaccgacggcgatgccgtaggcgattactccgccgagaatttggccgacgccgttgaagctgaaccagatgttgacgcggctgccttgttctttttttgtgtaccactgtttgggactgtgttagctcgactcattgtgtctaggttatagcctgtaggaacagagatggattttgtacctgggaggttaaaagtgcaaagcccggcgtcacagctgcttcaaatacaccgagcataaagcgaatggcgatagcaccggagtaattgttgacagcggcaaaacagctgagaatcattccccagatcaagatgcaggctgccgagtatttccctagtggaaggcgctggaggaggcggttggtcgggtattcccaggcgagataacctacgcaggagagctattaggtttgaagctcccagggaagagtcaattcgagagcatagatagaacataccaaagtagaacaaactcccgagccactgatactggtctccctcgagattcaaatccttcttaagacccataacgctggcataggagagagtggtttctacacatcagatcacagattaacacttcggattgaataaacagccaacagaacaaagcataaaaccaagactgctctttgctgtaggaaacaaaatcgaggaaagatatgcacatactatccagataattcatgccatagataaagcacatgatgggcatcatatgccaatcgatgatttttaacaagcggcgattcgtagcttcatccagctcgatagtttcaccgtgaagattgccaagggctttcatagcctcatcggcgtcgtgtgcatgcttctctatcgtggggtcgacatgttttatgttgcccatgtccatgccggtgtccacgctagaggaaattccgatagctttttcctctgaggccatggtgtcggttctatggggtaggtcgtaaagggacggggcagtagagtaattcagatcaagtaggtcagacagacaaatcttaggcccttcgtgagttgactgtagtacaactataagcaataccaaggcaatgtataaaaagatcaaggaacaccaccgggcgggcacagctaaataacatataacagaataacggtcaaaactccgcaggtccgatagctatacaggacgatcttagtacgtaacattaaataggttaatataccctgtactccgtgcgctgtacctctgagcaaagccgggtagctctgcccaggccgttatctcaagagtctcctcgaacgattcatcctatcacacaacgcagcacatgaggcacggcaaataacttgtgggcctctccacgataagaagccgatttatctggggttggcggtttgatgatgtgtctcattggatggccaagagaggggagggggatgatcggcacggaactgccatggtctgttggctgcggcgttatggttatttatcaatgcaacatagggaaggcaatgcggattattgcggagcgaagtagacgttacttacttggtgtgtatatgcggggatgcacacacatgtagtaagaatacgtcaagagaaaggtcgctagttacaatgtacaatgtatagattcctagttccgagtgaattccgatgaagtttaagcaaaagtacgtgttcttatctattgttccaagtggatttggaaaacgtctccttatcaaagttactccagaattcggatattcagagacttgcttttgatcttcatcgcagacggtgtgaaacatgctgatgagcactcgcatgtcttagacttaaccttgcccttgcatcctctgggcgtgcaggaaagcccttccgtagccggagaggctccagggctcgtgagcaatgatgtaagaaagcatcaagttgcaaaaaggttatatagcacgtcatcaaatatagaattttcattatgtatgtacatacagtggaacgtggactgcacactctattgcgcacccacacgggccagatacgcctcccagccctgctgctggtactgtttaacagcttcaacagggtccgcagcggcatagataccacgaccagagataatgaagtcggcaccgcggccaatagccgattgcggtgtctggtactgctggccaagcttatcgcctttagacgagaggttgacgccagtggtgaagacgacaaagtcctcgtcctgcgcgggcgcctccgtagactcgacctcgcccagcgaccgggtcgagacaaagccgagcacaaagctggggtacttgcgcgcgatatcgacagaggcggaggtgtaggcgcctgttgcgagggatcccttcgaggtcatctcggcgaggatgaggaggccgcgctcagagccgtaggggaaatcagtagcctgggcagtttgcgcgagggcatcgactatgccctcgccgggtaggatggagcagttgattatgtgggcccattcggagatacggagggtgccgttgtggtactgtttctggacagtgttgccgatgtcgatgaatttgcggtcttcgaagatgaggaagttgtgtttttgggctagggcattcaggccatcgattgttgcttggctgaagtcggagaggatgtcaatgtgtgtttttatgacggcgatgtagggaccaagacctgtgaatgggttagtaggctgtttcgtcggaggggtggtggctgggtttacttacggtcggcgaggtccaggagctcctttgttgtggtcacatcagcggagacggtaacattgctcttcttttcttccgcgacttggaaaagcttgcgtgcgaggggattggggtgcgattgggcgcggacgctataggtcaattgcgacttggacgacatggcggggttggcggggtgggttgatatgtatttgtatgtgattttgaggttcaaacgataagtgaatcaaattgaaactggctgataaatgcctttagaatacaattctcttttttgaggtccgaaagcagaataatagaagcgaagttcaagtcgaagaccttcggggaactttttctgccacggtggacccacgggccaaaccttcccggaggctggaactgtggcgcataatacgcatttgacatagaaatacatagcacatcttcgcttcaagcgcttagaaagaaagcaatggccatccaacaccgtagacactcaatccgaagagggcaccctgcacaagccagaagaacccgcccatcatacggcccttaccctgcggtttgcccgagtacacatagccgtagaggaacagagcccggaagaaaacccacagagcgcccagaccagcagcccactcaggatatttcagaccagagaccaggatgaagagcattgtctgcgaagaattctcgaggaagttggtgtgggcgcgttgagcgcagttgaacttctcagctttggcctataactagttaagtaggtgccataagaagtgtataggttcctattggatacgggcttgcggaggctgggtatagatgggaatgagacgcacgttttccttgcatagctccatggaggcatagctgtgggggtagggcaccttggcctccttgcgcaggctgccagtaatattgccgtgaacgaagcccaacagagggatggcgccgagtgcgacagcaatcacggcgctgagtatcattagcttctgttcaacgaagcatgaaagttaagctagaagaacctacccgtagttgccaggaacaatgaatgcgaccatgatgagaagagaatttggggaaatgatgcgatatggtggctctccgttatgattgtgtttgattgattacatgtatggagctcctttatacttaattggaggctcgggggtaacaagctccgagctcccgtcggtggaatcaatttgtccgttccgcccagtcatctactccgtaactatggatgaatgatggatacgagtgagatctcgccggcctacggccgtcgagatagccgttgcaaagcaaagcgactgattccaacttctagtgctgcgcaaggctcccctcttactgacttattggcttcacagcgactgcttttgtcataattctaggagaaaacttggccacgtgacacgtacgtacgtacgtacgaccttctgatttataattgcttcgcttcgctccgcaatcattgatgggtaatcattgatgacctccctattggttgatcatgcaattcatagcaatgagagggcaaataaccaatctcatgttcttgtgcaagggaagcttgtctagctttcacaaataaatgttcaaagactgctataagttccgactcccagtatatatcaggagtaatacgatacacaaaatgtccgctaaatgctggatgtcaaagttcatgttcccacgttcgataccatcctacttacactcccgtacttggcttgccaagcgaagaagtataggagcgctcccagcggttgtccgactagacaaaagctgacccaaaagatgcagttcccaatgaccctgccttcaggcccgcgcatattttccaatggtgcggtgaggctaatcaacggcagctggaacatcatcccaaagaacgcgacacctggacttgattagcccctaagctgtggctagagagtgaaagacataacataccgatgaaattgtgtgtcggaatgcccacgagcatttcgtgaagaatcgcggagatagtgaaaaccattccactcgcagctagaggactccatccgcgacccaccagtggcgagtagacatgtctcttcatgaacaggtagacaggccggttccaagatcgccaatacatacccagactagagctgttccaccaatcagtgtagaattcgcggtcaccaaaccgcatgacctcggccaaagcgttcaaaagcgattggaacaatgcaaagaagccagcaagccaaattatcagcgagatagtggatagtttcatgacccgctccaagatagaggcaatatccattactgcgatcttgtcaattgagttgagcaacaccggtgtggcatactgcgcagacagaagccaaatgaacactgccaggcccacgaactccgcaaggcgctttgcaacaaatgaccaccggatggatgctgtgcgcggataaacaggctgatacaccagcgtcggcgccagccaaaagtacgccaggttattgatggtaatattcctagggtaagggcacgaggagtagatttcgggcaagcccgggtctgcggagggattgagtagagcgaggcgaaggtctcggtttgtgaaggcataagagcagttcttcaaccacacgatgatcgcgtgcagctcgcatattgtcccaatgcctgggtggtggatgtaaaaatacaccacaaagctagtcactgtgaggcacagggtggcattgagcgtgtgcaggaaagcagtgtacggccaggtcgactggaagaccttctgatcgtgctctttctctttctctgtctttttctgacggcccactgttcgcttagccgcagtagcggctgagagctcgatgatgtatgccacaagcaaatgacacggaaccgaggcaaacaatatagaccccagaacaacgtcttgcctgcggtagtcgtggcatttaatacaaattagcacgccatactgaatacttattagctggcaattcgacacagtgagcatttggattacccactttcatgaagttctcaataaccaatcgcaggttcattgccactgtcgaaacattagccgtttccatatacaattccctagcgatccttaccgagtaccaacaccataagatttcgaaaacctaggaagttgggaagcacgtcggcctcccgactgaggctggaatgacgagcttctgagtggtatgcagctacatggcgatatttacttcgtttccttgtagttgatgttgatggcggagagacctcggtttcattctgaatagccccgttcgtcgaattgagctgcgattcctcgcgagcgcttttaactgacccagtgcgagtagccattttaacagctctgcgatctcggtactgtgagagattgaagggtcttcaagtcgagctccgattaaaccggagcaccgacggagagcaatgcggagattacaacaacaaccaggccgcacaattacggcaaataggaaaagaagaaaaggagaagaaggagaagacaaaagacagaaattagaaataagatgatttaatactgggcatggcgggggacgagacatcatagcgcaagcttgcagataaaacttgcaggggccaatcagcgtcacatgcgctcaagggacggatcctgcactccgaagagcttcgactctctccgcatctattgctctttttagccctgaaccggtccgattcagtattcgatcagtattttaaactccaattgcctgcgatcctcatgtttgcgaatcgacagccttgatcccgtacaacttttcgaccggtcgcgatggcctactacgaggacaatggaggtgacggcccagggcggtttggcaagaatttcgacggtccagtcggacctcgtagaccacgtatgtttgcttgctttaaggttactttgactgagcttctgcttgttcatatcccgactgacaaccgttactcttaccctcaggtctcgtcacggattatggctcttcgatggtacaatggatgcgaacacggcaaccgagatacaaaggaggacatcgattggagacggaacgaccgagtcccagcttcgcggtcgatgtatgtgttgcttgatctgttctggtctggcgagcaaagaaactgacatgcgacaggttcttcccccgatggcgcggccctattctgctgtcgatacaatccccgtccgacaccttcaccagtcaatcggaaaatcaaagaagcccattgtcgtggtgcgatggactccagagggaaggcggctgttgaccggcggtcatacgggagagtttatgctttggaatggaacggcgttcaatttcgagaccgttatggatgtgcgtatctacagcttttgcggattgcgccctcactaatctgagatgttgtctccggtgcaggcacactacgatcaaatacaagctggtgtcacgtccttggcatgggcccatagtcaggactggctagtctctgggggacaaagaggtgatatcaaatactggcgacctaacttcaacaacgtggagactatcgatgacgcgcaccacgatgcagtccgcgatctggcctgggcacccagtgataccaaattcctttcagcgtcagatgatacaaccctcaaaatctttgactttgcaacccgaacggccgacgcgacactgaccggacacaactgggatgtcaagtcttgcgactggcacccgaccaagggtctaattgtttctggatcgaaggaccaccaggtcaagttctgggatccgcgcactggccgctgcttaacgacactccacagccacaagaacaccgtcacatcgacgcgattctcgcgtgtgaacagtaacctccttgctacttcgtcgcgagaccagactgcgagggtattcgatttgaggatgatgcgtgatatttgcattctgcgaggccatgacaagccagtttcttctctcacatggcatccgattcacagtaaccttatctcgactggtgccgaggatggttctctctatcattatctacttgatgagccacacctgccggctggccagattcccaccgtggcgccgtacgacagcccggacccggcgaatactccgccgcaagtgatctatccggcacatcgggtacagtatgcgcatggtgctacaatttggtcgctagattggcatccactgggtcatatattggcttctgggtctaaggataatttcactcgattctggtcgcggactcggcctggcgagactagctatatgaaagaccgattccacatcggcgaagaggccgcagaagcccagggaacatggaatcgcgggtttggccggaaacaaatgcgcgaggacgaggagcaagaaatgcaggatgaagccgacgggctcgtcgatcaacgaccaggtggccctgctctgccgggtattcaaagtgcgccgtcggccgtccctcagcccgatcttccagggttgctacctggtattggcagtgctcagcctcggcagccaggaacggatggcggcgctatgggtgggatggatccgggccgtttggctgcactcatgtccactcaccctccatcgcagtcgagtacccccacacctggaatgcatgggttccccatgccgcagggtataatcggaacacagccgatgaatatggatctagcacaattacaaaagcaactccagggtttccctatgccacagaatctcaaccttcaagctttggcaaacaaccctggcttccctggtggatttggtggcctgcctggtttgcaaggcggtggtatgcccgatggaaatcggagacagtgatgaaaatggacatctgatttgaaatgcacgttgaatcggcttggcattggcgcaaaggacatagcatggctactttgatgcggggtgacggcgttatttaagatatcaaacaccatttgtatcataggaaattttcgggcatttcgaagcctcctggatccttgttgatgagactgtttgcgtaggtctaggttggctgggcataaacctgtagctgccgtccacgtaggtagacacggtagacaattgttatatccggcacatccggcacagtagtatggtcgagtagtagcagccggtataccattcaaaggccaccttgcatagggaagctggtgacaataagaaccatcacattgacaccgccccatatcatcggtagccaagttgacatcctgaaattgcctgcctcatacaccgcgccgaggctatccaccgtagaagcgttagctacctaatcattcgggaggccaagtgtcaagcaaccaacttacacaactccaattatactcccggctagaagcgactcaagcgctgcaataaagatgtacaccaacggcacaatccatatcacattccagttacggaaatgggtcagtactgcgcacccagcaacagtgagatgtgtcgctccgtagaatatcagcgtccagaaaagtgtgaagcgccagatgtccttcgtgtagtataggtagtatgcttgatgatgatgcgccggcaggggatcgtacaatgacggaaaggaaggcacttcgtagttaatcgggacgcgattgttggccatggagaaatagctgcgccgtttcagcaatcaatcatcaaagcatgacacgtgagcaggggacagtcactttgaccatatgtgttgctagcgtatcaacaaaaaccgcatgtctaagagactctcggagatgacgatgcttgtttgcactgtttagctccatatcattggtcagcctttcgtggtggatgccccccgtatttagctctggacccggacctcggcttcatctcacccattgagagatgtagagactcttgtctgggagcatccctatcacctccagtgttgaaatggccacggaaagatcattagctacgctgctacggtcgctgcaggcgacttccagcttccaagatgccgcttcgtaagagccaaataccccaatgaggtcaatattagactaacaacaggccaattctcagtctgcttcccacggctaccagtttcctttcaatgttagggaatcctctaaacctgacactcctttcctcacaactcctcactgcaccttcgctctggagccaccccgtcgacctccaatcatgtcgcaagatccttagcgtcttcaataccgccgccatcgccgtcttgcagaatgatactactgacgaaccccggattccgtacgggcggaatagaaagatagagtacgaggcgtgggttaaggcggtcgctgagggcgccgatgataagtccccgcggtggaggcatacgctgctgctgggcggaatcttgatgggattcgagggacaaaaccgacggggcttaccacgacatattcgggtgaaactcgagatggcgcttgtgagagcggcgcaattagcgctggaggagcttggttctgagactgggattgatggacagtgcctcactatggtcttgaactacacttttgagctgctgtcagattccgagagaagcacgctggattatgatcgtttgctcccggcgatgattcagtcatcatacttgtcttcggagggcctcgacggtggctattttctgggatctattgatcaggatgttgttgaggcctccgggaagcagtttcgctggtcggccaactctcccacatttgctattatctcggcagtagctgctcgcccgcttgtgtccactctggggcctttgtctcgtcttatcgcgcattctgttgataatgtccgggatccgcgaattgttgcgcagactgttgattacctagcgggttttgttcggacactcatggttcaatggcggcagaataaattgtctgagattgatgttgcggaagaagcagagttcctagactctgaatcccgggacattacgcttcctgccctctggaagctgttgcgaaattgcttatattcggtggttatcacacttcgggctgtactggggagaactatcaatgatccagctcttgccgccaacagtagtgagttacagacgagtcgtgtcattttttttttttactaactatgctcctgtcaggcgccccgtacctatcgatgcaatgtctccacatacttcgcaacatgtatttcatctcttctcggattggccagaatgcctcatcgcagcagacgttcgttatgttggcagccatagatatcctctcccaatatcccactcttgccgagaacttcctgagaagcattaagccaagcgatataggacaaattcctgctcacccaattgaacgatgtctggatcttttcttcttgaatgtggcagagcatttccctcttgtcctatccccagggacgaacgaggaactgttactatccgccgcttttccatatctcgcagccggtgctaacagtcttctgttggagattttcgaagctgctcacagcctagtgcttgttgtcttcgctattccccacaactcgggattagctgccaaacacttgcctttttatatagaaaaccttttcgctgtgagtttcatcctggctattatacgaaagtagttgctaatcgtccacaggttttccctactaacctttctgcgcgccaattccgccttgcgttcaagactgtcatccaaattacagcacctccttctcctctggcgaatagccaacccgctctcccttcaatcttgctggaagttgttcacgatcgtgctttgaacgcttcctctacaccgatccctgcgcagggcccaaatccagacatgagcctgagtccggccgtctctgagcaggctgttctgacccttgctctcatcgattctcttccattcctcctagtcgatgatctgaaagaatggttgcctttagcagcacaattgatcaacacaattaccgaccgcgatatgcgacatgcttgtatcgatcgtttctgggaggctatagccggcggcgagatggatgttgatcgatcttactgctgtattacatggtggagcactgaaggtgggcgcgagcttgtccttttcggcgccgagaccgccccgggggagtctgatgatactggaccttacatgagtggcgcggttggaggtgtcgcgcctgaaagtaagctataatgatgtcactttagatagcttgcaatattgaagctacggctccaacgggtgcggtaacaccttataccatacaccatacttctaatcgatcaagtctagttctgaacattttcatatatactaatattagtgtgttcttggtatttattcgactcatcatctttgaaaatgtaacgttcagcaactaaattcccgggatcccaaccggggtagcctttctgtactgaacatactcgtcgccaaagaaggagatcaagtaagcttcttctcctgcaatcacgtaaatcagttagcaagaggtccaatgcgcaaaaaccgacagacaacttacgcttgatccggctcgagaagaactgccacaacacgagggcatatccaacaaaacaaaccatattccctagtatcaactgtgttcccagaccccaccagaagaatccaaagtagctcggatgccgcagataccgataaagcccagtattaaccaaaacatgaccctcctggtgctgactctgcacatgatgattgaagttactagcagcctgcgccatagcaatagtccgaacaatctgtccgatcaatagaagcgcaaagcctgcgacaagcagaagcgagaccgagcttccgaaaaacggttccgtcacagtgaccatccgcccagcagcagtctgcccgggccagaaaacatgcgacacgatgcactccacgatggcagatccgtgcgcaacattatacgcccatccgttagatgacagcaggaacgcggagatagtcgcataccgcgtgttgtattgcgccgtcacgtagaactccaggaagtggaacaggctcagtgaggcgacgaagaacggcacgcgccacagtgaacttggatacacggtacttaggaacaatgccatgcttgctgatagcccgaggctggtgccgaggagcattgcgcgcagcgaaattcccgccagagacatcttgccgtccgggtagattgaggtatcggcatcgggcgtgtcggttgaggcatcggaggaagaagggaaggatatattgctgttggtgcggtcgtggactggaggtccgggtggtgagatgtgtttcgaagtgtgggtgaagttcagggctttgtttggctctgcgccggagcttgttgcgagcattgtcaaagaaatagagaattgcttgggaagaaaggggctgcttcttgatgtgtttatttggttcgaaaatcgggcatttcgagggaattagtggaatttaaatagtgtgtgttggtgaggggggagtttcattgtctgagaacaatctcaagaagattgtattgtttcgcatcggcacccgcggactttttcccccgacatgacggtggacatttcaccccgggcccacatggcctcggctttagagctctaatacctcaatgtagcttgaattacaagctagtgcctagcttcgctctttctcctctcttcgagatagctatgaccatcacaaccatgtcagagcctgccgagaaagagaagatgcttcgcggcgagctctttcgcgccttcacaccggacttaatcgctgcccgtgcgcgctgcaagtgggcctgtaatcggttcaataagtcggacgaggtgcctcgtcggcgtcttgttgaaatgtggagagagtgggtgatgcggtcaagctgaggcttaggtctacttcatcctagaagtatactatttatactaaaccattatatagtatcgccgacgaccagacccctctgccaccaaagctagatgaccccgcagctgatgaagctctcttcgcgcaggacccctggatcgaatctccggtccatgtggactacgggtttaatgtcaagcttggagcgggcgtcttcgtcaactttaactgcgtctttattgacacatgtcccatcacggttggggctcgcactttgtttggccccaatgtgagcttgttctcggggactcatccgcttgaccctgccctgcgcaatggcactgaaggccctgagactggcaagccgattgttatcggagaggactgctggctcggcgggaatgtgactgtacttcctggcatcactattggcagaggtgtgacaattggagctggcagtgttgttaccaaggtatgttgaatgcaccttctgatagcctgattgtataatcatgctgactttagcaccaggatattcccgcttttcatgtggctgctggtaacccagctaggatcattcgtcggattgaaacgacaatgaaagagtgattgaccctgtgttattcattgactggtagatagtatagagatatatatgactttctggctacttgcatctatcgaatatcaaagggatcaaactgcgtctagattacatggacgtcatgcacgcctagttcagacagcgatatagataatgataattaactagaatgactctccaaaacctttgacaaattgggtaggattcattataccacgatagacgccaagagtccagactcgatgcataaggccgcataaggggctgtgcatctttggtgctttatatcggtttttatatagctggaataagagtgtagataggcagtcacatttgctacaaactgcacagtaatcgaattatttccctcttctttctatgcaaactgcaataagcaatgtaccatgcaaatacgcgataatcaatctccaggagcttggttgtgtctttgttaagagagaccatcttgtgaacgctctccacagaacaacgtcactggtcctggcgcgtcccccagaaaagctgtcgaccgctttatcttttctaaagacctttacttttctcccactcaatccttttcttaaactcacaaccttctttttcttcaaccttcattctcgcatcaccttcatttcacgcgttgtttcaactaccctgggaccactacgtgcggaaaatgacatggctgtacccccgccagatagctcttacaccccacctcacactcccttgatcgaagaatctccattcatcagtgactctatggacgatcttgatcctcaggcgacccggaaacgtccgcgtctcgacagtggaagtcgcgtcagtccgaccttgtcgttggatggaacctcgcgtactgcctccgtcgcacctgcctccgacatggatgaggcctcggattctggaaatccggttaacaaagtcaccattaacacaaaatctcctctatctcccatggctccagacctccctccttccgacgctgggctctccggcagcgacctagagcttctaccagataccgatacagctcccaatcccaatcccatttcactttcctcctcgccctcctcatcccgaagtcctcaaatcgaagtcgctgaaccggaagatatcaatcaagacccgaatacctcaaactggaagtcactgggccaagtggtgcgggatcaggatgagcccgaagtgatagaaatccaagacgtggctcctctttccgactcgttccctaaagtacacactgagatgacaccccgagagaatttcaaggcgcttggtgatatgcttgaatttggtaataagagactccaatcaacgagacctgggcaaaatactaatacagccaataggacacccacgcgaaggcacggcgcttgttacaataaaacaatggcttcacacttgtgtgcacgatcttgatcgcctcacaatcgaggaattcgcggccgatctagatttctgggaatacttgccctccgtcctggaccgtcttttgcgcagacaacaagactttcaattagatggaattgaagatatctcgagcttcttcgagcaatatcttctcgattatgctcgcattgtccttcatcttgttcgcttggacaccacacttctccgggctgttgacgaagatgacggtgacatcgaaatgcctccaagcacctgtcgacgatatcttcatagcttcccttggatattccatagcgaccaaattccctttttccgggtcctggaaaatcagtttagcaccgaaacgcgcaatctccctgctcgactaaaagctcaggtctcagctcctccgtttgatgcacccggcgcactcattcaatacgctttgcacctgcttgcattacttccgaattgcccgcaaatcgttaccatgctgtcaggccctttggtcaacatgctagcgttgtttgaatgcgacacggagaggaaccaaaatggtgattctgattctcccgttgacctgcctatcgattcaaccagcctccagcctttttacgaaacggttcgagaaattgacaaagtatacaacacatttgtcgcaaagaagtcgcaactggccaccagtgaactgagcgatagtctcctgaccccaatcttccgcagctaccgtttcctttgctttggttactcggaatttttgctccaacttgcccaggaattgtccattcaactacctgaggaggcagatgcagagcaagctgctttgtgtgtcatttggacgtggaaattcgataccttaaagaagcaaatcatggaaggtcgaatggagcttcgtgtccacggcgtggaaatgatgcaatcggatctggtcagcatctggggtcaaaatatatcccagaaccgcgatggcatcgagtcgccattcctgaaatatttggttgaatatcttcgggagaacaagatcctcgattacctcgtggggattgactcacacccacagctgatcagccgcagcagtaacatattcggattcctgattgtgacggcgaaatacaccgaccatgacacggatgttatctggaaaaccgtcaccgagagtcaagatgatcgtactgtttgtgaggtcatgtccatgctcgcacggacctttgccatgcatccgtcgaggtctaaagcgttgctctatgtgtgctcaaaattgcttgagtttcccttagaccgcttcgacagccgcataatcgatttctgtgagcagctggtgcctcgtatgcgcgaacggcactcggatcgcgatcgggactatcgtaacatgtccggcgaggagcatatcgattctattccactaaagctctgtatccgcctaatccgtgagagctctggagcgaaggacctgcctctggaacaaaaggaacttatgcagggatttggaagcgagcagctgggacagttcatcaaggctggactcaacgaaaccgacatggcagagacatatgagcgctgtattcaagacattgcggagatgaatgaatgcactgcgggcagtatccaagttttgaatgcactagtaccgcgtgatgacgcacgagagctttggaaacttgcgaccgatttcgacttgacgcgcttagtgataatcgaacttcaccatctcgttaccaaagactacgcgaagctcaaggatccgtcttcaaagcatggattttcttcgcgggtggaaatcctgcggcgtcttattgatctggccccagaaacaatcacacctgatctcgggaacacactctggaaggatattttcatgtccgagaacctggctgctgaggaacgtcaaacgatttggaaaatgatggttgatcttaccaaccgtaccaccaaagagaacccgtttcttgaactatgcattcatgagtatctaccagatgtgcttcctaaggattactcgcgcgaggtattatggttcgctcaacagtcggttcactacgagattcgaatcaagtcacctcccattgttggggaaaatgaagtcatatctattcctggaatggatcgaatctggaacttcatactgacggcacctccgcaatcgatcgaagccgaggcgattaaattcgccatcgatagctatctggaccacggtattgttcgcagatccccccggtcggctatcgacgctactcatattgcactcgtcaatcgctgcgtggaccaactgaagtctgcagctgtcgcgttgaaaccttcttgcaacggaacaaccaatgtcgaagtttctatggatatcgacagttccaatcaagacgtcggaacggacgaacttatgttcagccggtctctacattttcttcgccaattactgcatggattgcgaactcgcccacagtacagctccccgcgtggctctccgcccaccctcccggaacgtcctctgaaaggcgagcccatcgaatttcgatatcaatgtttcaatggcgcttccatgtccaagatatgttcaaagcgcattggtggtctctctacggctgccgagcttgtagaaatgcttgtgcagctgagccgattctcgaagttcacagctatccttggcggacagaaggtcgagttgctacaagatccagaggcacttgtgaaaaacctgaagctatcttcaggtttactgattcttcggaaggcccctgatgcccatgaaatcacgtgggccgggagaccgcagtctctgacagcagtggacaacgaagtgctgaagcacttcgacgagctgtatgatatgcttgacctcaaggatgatttggctcgacaggtataatcccgttggctctcttattctagcgggatgttgatactgacactttgcagattattgacttcttggtggtcttcccacctcaagtgcgggccctcgaacttgttcgatccaacagcaataccgagaaagacatgttcccgttgcaaagacctttcaaggctttgtactccttgaatacactatcgatgtgtctccacgaagaggctgcagaggtgagttaaccgtttctgggttgaatgatattcttgctaagatcgtcatagatgtctccagaccaagcttttgtgtctcatagcaatcgggttttagttgctttcctgacgtcagacgaactgttcagctcgctctccggtaactcggtaactactgtgcttgctactagagccattgaatgtcttctactggctatatccggtatgtcgaatattaattattgttcagtcaatgggccgcggccaactaattgtgacctagtgtatcgcccgactgacgatgagtccgttcttattgccgatccaatgtctttggtccgacgcgttcttgacttgcttgaaattggccgcagtggtcccaatgatccaccggcttgtacatgcgcccaaagcttgatttgcaattcctttgcggtcttagtcgagggttcattgcgcgaccttaatgtctggaacgctgtcaaacagcatgcccagtttgatcgcttaatcctatctctactcctggaagaaaatcgaaagccaattcggactgatatcctggaacgcttgaagataatctgcgggcccctgaaaccgttcaagctgtctacgaaaaaacccgagatggaaacccctactatggaaaaccccaaccggattgacatgcttgccactctgtggtcttcatttttgcaagtgatcccgaggaccgttgagcatgttccccagtctgaagagttcttccacgctgctctatggatgttccgcacagtcgctcagaaatcgcctcgggacttgatcttcaacgagtatcttcaacaatggagtgcagttatgctcactcaccaaacagaagaggtattttcatccccgaagaccaacaaatactgtttactaatggtttttagtttgttgggcgtgagccagcagacaatttgatcatagggttctctgctttgttagaatggtgtctggaattgggcaacgccgcgggcatcactttaaacactttgtatgtcttccttccccgtccgatcaagtatgcagacatgcctaactgggttttaggaacatcgccgaagaaatattcaacaagtacctattcccggatttctctccagaaacggtggaacatgcagtcccacagattccagtcatgcacagctacactcgctcgagcctttacaatgtcgtgagcctgttgtgcaagcagaacgatcggacttattgtgaagttttggacctcctcaatacaaatgttccacgaggttagcatcacggaattttgcccactgcgttttattttcacactgaactaaccgcaaatctagactccccttatctggaatatgcatataatagatcgttgatgcttcggtccccggaaggctatgcgggcctcaaaaatctttcgaacacatgttacctcaactctctcatgacgcagcttttcatgaatatcgagttccgagactttatcctgaatctccccatagccgatcgaatctcccaaaagctactctatgaaacccagcgactgtttacatggatgcaggagacttggagcaagagcattgagccctcagactttgtgaaaagtattctcacatacgacaacgaggagattgatgtgaccgtccagatggacgtcgatgagttttacaaccttctctttgaccgctgggaagctcaggttctcgatgccgacaagaagaagaagttccggtctttctatggagggcagcttgttcagcaaatcaagtcaatggaatgcgatcatatctcggagagacttgagccattctccgcaattcaatgcgagatcaaggggaaggcgaccctcgaagacagtttgcgggcctacgtggcaggcgaggtgatgcagggaggtaagttaatactgcgcccctaagggagctcgaagtctaatgagccttcagataacaagtactcttgtacctcatgtggccggcatgtagatgccgtgaagcggtgagtgataatgatatagtgacacaaaccgactttctgactcttatttagtgcttgtctgaaagatgttcctgataatttgatcttccacctgaagcggtttgacttcgacatggtacatatgctgagaagcaagattaatgacgagttccaatttcctcaccacatcgacatgactccctacaccgtcgagcatctctctgacccggagcagaccattgcgccggacatctttgaattggtcggggttcttgtccacactggtacagctgaatcgggtcattactactcgtatacccttgaacgcccctcgtctggcggcgaagccaattgggtcgagtttaacgactccgatgtcggcaaatttgaccctagcacaatcgcaggtcaatgctttggtggtccgaatgagacgacgcagtacatgaatggagcctctaagagcaaagtctggaatgcatatatgctgttctaccaacgcgtgtccacaattgagaagtccaaagaaatcttcaagccaacgaagcccgacctccccatacacctccccgtatcaatttcgacccagaactacattgcaatggacaacgaaatgctcattcggatttactgccttctggacccacaatacgcatacttcgtgggcagattgcttcagcggtggcccgacatggcaacggaggataccgacaagactaaggcagagtcattggccatcaatgtcggaatggacactattgagcaattggtgacacgtaccaaatatttccaaggacaccaggaggtttacagcgaactcgtcgacatgatcaacaaaagccccaatgcggcccaatcggctcttgagtgggttattaatcggccaacttctatgtacaatcttatgatcaagacgcagaacgcagaaatccgaagcaagggaatttcgctgatcaattattccctgaaacatctccacttgatgtcgacatgccaggatctcaacgaagatgaacgaatctcatggcgcgaccgattcgatgaagctattcagcaaattgtgcccatggtgacagctctctgggccgaagttcaatcccttttacgagtttgggacgactactttggcttcttattgaagctttgcaactatggcccggagattattcaggtcttactcgatcaaggccatttcgctacatgtatggagattctctggatcgatgaagaagatagcaagaaattgcggatccggtatcccaattacgtgcgcctcttgaacaaaggacgtcggttcaaccatctgattttgctgtcattgtgcttggtattcttcaagcacgttgacctttcgctccgtccaacccccattggcggacaacggcggtttttgaatggcaagttctcgaccagcatcagagaaatcgaactcatcaagcctgttgaaaatgatgggtctctgtctatcttgctgaagcttctgaagcatgagactcttgcgaggagccagactactcgcgcgatcataggagtcctgttagacggagagcctgatgcaggtttgttggattcgattcaactgacactggagaatggtgtcagactagaacccgctatccagtgtacaccattcctggaggcagccacaacgttctgccagcgttgtccggataagcggcgggtcattgacatgatcgacttcgttgccaagggggtcgaaagcattgacaatagcggcggccaggagcatattgacttcttcatgtgtctttgccgtagtaccaacgagcggctgaacatggactctgcgaattttgcagagattgttcttgacaatatctcagtctgggccccgaccttgctcattgataaagacgagactgtccgtcgcaatatgcagaatattctcgaagagacgatctttaacgataagatcgtggaaggcaacacagcggactccgaacagaatggcgaatggcagaccattatcacaccagagcggcgccatagcctttgccgtcggctgccgaacgcatgcatcgagcggctcaaatcggcattcttgaccgatcagatcagtcatatcgacgccagactacttgaaaatattaccccggtgatcaactattgtctggctactttttacgacgactctgaggcggaccagcaagaagttcaacaggccaatggtaggtttgagtatctacacctagggttcttgcagtctcactaacacactcttctcagaactcatctccctccttaaatcgatgtcgctcgaagatgtccccgatgacccgccttctggtatgcttcaatatctatccctcctgaacggccctggaacatcatctaacccgatacccctagaatcggacgtagcctcagtcgaagattgggacgcaaactcggtgatcgcaactgattccgagatgggagtcgctggatctccttaagacaatggcatttcccgctgcaaattgctttttgttgtgtttctttcccatgcgtttttgcgatgtcaatggattcagcgagcacgatgtgtgcatgtgatcaaaggcaaatcctcatacctcacggattttacgaattcttgctgtgtttttcgccctatgatgattgtggttgttcgtggcgttttcttttgctcatggtgagccggagtaggatttatttctatgaagggtggctttggacggacagctcatctacatgcatttcgcaagactatttccgagcattgagataaatagtttctgtcttgagatttcaaatctttgagtggattgcattcaacaaagttcgtagcgcatcattttgttcattttgttcaatgataagagtaacacgtatctctattttattttgattaaccctcttgctctccgccagctggagcatcgccctcatcttctgattcaacctccacagcagcaagtgcatcctgctgagcccgcggagcgccgcgagtcttcttagctttggggctgccggggtcagcagcgttaggtgcggttgcgagtttagtcgctggaatgccaccagaagtaacatagaggaagtaacctgcggggaagtgatcgatatggttgaagaaagaaccaaagctacagtcaaagtcagtattgccgtcttaatgtgaaatcaaacgaggacgttggttggaataataacatacccagcactttggtcctcctcccggaaaattcgatcatagatctcccgctgcttgaactcattgatctccacctcaaacttctggaaattgatcggctgacggtcaagaccctgtgccttgttgttgtacgcgtcgaagataggccgctcaagcaagaggcccaaaccaggcgctttgggaatagcaatgcgctcaggaccataggtctcggtgatccggtctggatggcagcctgagcggacaaccatcgtagccatggcgaccatcttacggatctggtgcatcatgaaactctgcccatggactttcagactgagccattccgtgccgtcgatgataatcggcgttgtgttcaccttgaatgacttgatgtgccgtttcgccgaggggtcgttgtgcgtcttctggatcgtgtagttatgaaagttcttcgtaccttcgtagcggtcgagacattcttgcaggcgggcgatgcgtgaagcgggagcgcggtaggctcgtttggcggtgaggtatgctgctttgatggccttgatggcatcggcgatggctttttgacgggggtccatgacaaagggctttgaggcctctgcgtcggccggctgtttagtcatgggctgatcgctggtctcctgctgcgcgggttgctcggcgggggccgaagagacatccttctcttctgtgggttggagtgcatcgcgggagtcgtctaggtagagagacttttcgacgatgcggcggatgtcttcaggcagggtttctaagatcggcttgatgtactctatatcagcctcttcccaatagcctgcgacctcttcctgtcgagccgtgactgcatccaactcgcctgccttgtcggcaagctcgatgattttctttccaagataggtgcttgggtgaggcggcaggagacagtgacttggcagcaaatactcgtaaactcgggagtcgcacatctggtagcagctgaaacttttgctggtcacttcgtagccccagacacgaatttgggggctgagctgagcgtttattttcccgattatatcttcatcttcgacaatcatctttagtgacacaacatttccagctgcgtggacacccttatctgtgcgggcacaacggacgaaggaagatttcttgggatctgccgcattggctttggaaactgcgccgacgttgacgagggccgtgaatagatcaccttcaatggtgcgttggtgctcgttcctataccaaacattgttagcgcaaggatattaccttacaccgaagcagaaaagacttacaactgcatcccggagtatccagtccccgagtaccccatcagaagcgcaaccttctttttggggcggcgctcttcgctgtcgatctcctccttggagaattgggtagcgtagatcggcaagctgacatcttcgccgttctcgatcttgcgacgcttggcttcggccttgtcttcatgacgctgtcgcttatctatcgcttggcgacttaattagttagccgacaatgcgaagaacgggaggttacaattgacgcaacatacctccattccgctcgccccatatcgcggttcttacgccttccaccacctccgcctcctgttcctttgttgtcggccattgtatccgctggaagatctctgatagctccgcacgaggtgcagatgggtcgcgccagaaagaacggtaaaattgatgactaacagtgtggttcctggtgttgtggggaagcgatcgaattagaattgaacctataggcgcagttaggatcccagaaaggttccgttggagaatcgaggcacacatgaaatcaattttcggggcaatttgtcttcgactacgccttacgcgcggttcatcttttccctgatatgggcactagtcctataacggtctagtgtgtagataaatcagactagccatatatggtcatatttacacctgaggaatcaactttgcatgtgacgtgaagctccgcgctttgaaccggaattgcaactgtccttgttcagtcaatcaattgcttcagcgcggtctgtcgctcaagcgcaactataattctctcgtggaccccttcactccttttgctgcctttgattgaagcatgcttgtcttgtccactatctgaacactgcgacttatcgccttgcgctccagttaaattcttttccgaccttcttcccgactaccatcttttgctccgaagcttctgcaaacatggagctttcaaagacacttatccgaactgtggcgcgagcattttacgagacccgtcacatcttggtcgttgatgcgctctttctacattcagtgtatgatgagagttgatctctgttgattggtcactttgctgaccagctacagtcttcacgctgaggatctagcctttttgatgggaatgcaacagaaagatcttcgcaagctttgcgccaagcttcgagaggatcgcttgatcggagtgtatgtcacttctccctgacgtgatctacaacaaagggtgcaaaacacaaagctgatctagttctattttgattttaggagcacacgcgccgagatccgcgatggctctactcgcccagtcaatcgcgaatattattacatccccctacacccggttgtcgatgcgatcaaattcaaagtctccaagttgacagctatcatcaaagcgcagtacacaccgagtgaagagcgcaaggaatacatctgcgtacgatgcaaatccgaatggaccgaactggatgtattgagtctggttggagatgaagggttcgaatgtcaaaattgcggcgccatcctggaacggacggaggatgtcaagggcgcggaagggatggaccgtacgggccacgagaaaaacagtaagcttatggcacagctagataacatgctcaaactgctcaagcagattgactcggtcgaaattccgccgaatgattttgaaacagcgtgggatcacaaggtggaggttattcggaaccagaatacacacccagtccgtgccgcgattgctgttcctcccaaggcccaggatatcacacgtcctaatgccaagacggatgccgctgcactggagatctccctcacctcaagcgaggaaaagagtgctgccgagcaggccgatgaggccgctcgtaaggcagcattggagaagcaaaacgcacttccagtttggcacacacattctacggtcaatgcatcccaggttggcagttctcagatcaagaccgacgttggcactgtagtgaagcctgagcttgtggacgaggaccaaaaacctagtctggatgctttggacgacaaggtcgccgcgtactacgctgaaatggagcgcgagaaggaactgcaggctcaagcagatgccagtagtgcagaagatgattcagatgaagaagactttgaggacgtcgaggggatctctggtccaagcggaccggctacgccccccatggctggggggctttcaaaggccnnnnnnnnnnnnnnnnnnnnnnnnnnnnnnnnnnnnnnnnnnnnnnnnnnnnnnnnncagggggacgggctccgcccgccatggctggcggtcttacaagtgcccctaccacatcttctgggggcgctggcaccaagcgtgaacacgaaccggccgctactgtccctccatcatcaattgggactccgtctgcgcctgccgacgatggacctgcggcaaagaaaatcaaggtcgatcctgatatcaagcctgatcctgatgttaaaattgaggctgaggttaagaaggaggccgaggaatctgatgaggacgatgaggaatttgaagatgtataatgaaaccattaaaaaagtcaacattggcgctggcgccgaataatgatggcagactgtggagccctggaggcttgcaaaaccattcaaatcccgcatagccatagaattacattttgcccaatttgcaagacttcagaatcaagtaaattgacaatggatgacgagacaaagcaagtacgttgcaatccagtaggtatgcccaatgaaagagattaaagataatcgaacaggaggagaagtaggagtgctcgctgatgcttttgagcaaaaaccagaaccgattgctgtgctatgtaaagaagccatgtagctcccctacttagaggtataagatgacgctgtagtaactcttgccctcgccggctattgctagctctacaacacaaagaaacgctctatcatgacttggctaaacgtgagattcttacgtcccaattgagacgtccctgcagccatggcggcgcttggtaaaatggtcagccggagacatttcagttgagctcggagtttcttatgttatgttcgaattatatatttaaagtcatttccattatttggatttggtataggtagaaacatatctcagtaaacatgacggcgattgcactattctgcctatttctattggcagctaccagtctttatggcttgggtcgagttgtatacaatgtcttatttcatccactgcgaaaattcccggggccttggatggctggagccacatcgagttggaaagcatacaaggaagttataaaacaagagtcggcggttcatgagctctttgctctccataagaaatacggtatgaatgaatggtatctatgagaaatcctcttgacatttaataggttatattgtccgcgttgcgccgaacgaggtgagtattcataagcccagcagtctacacttccctctctgggttatagggctcaaacaggttacttacctctcacagctccattttggaagcccaggcgcgttccacgatatctatcatagcagcaaaaggtgggacaaggacacgggtctttatcgaacccccggagtctcatctgggtcattcacgttcttgaaatatgctcaggcaaaagaacgacgggaggtgattcttcccattttctccaagaaagccataaatagtcttgagcatctcgtctggcgaaacgtgagtattgctttgcttctgttcactggcaacctaccttttatccattgctaattcacggtttctaaataggcaaatcgtcttgcatcttctatcgcccagacaaatgccacaaaaagatctatcgacctactctacgcattccgttcctatactctcgacactataatgtgcttcacattcggcaactgcgtaaacgccctggatgcgccggcattcagcgaccctctcattctagccatggacgccagccttcgtatgctgcctctcatgaagaacttccctatgatacgagacctcatattcaccgttccaccggccctagtcatgcgccttatcccaaacgcccagaaactagctccacgcctataccaggtccgggatctcgtccaacaacagcttcaaatcgtcctaaactgcccttcgaagctagataccgtgccacaccagaccctctttcaccgaatgctcgacccagaatcataccggagcaaggaagtcctgaatctagcagaactacatgacgaaggcttcacactcatcttcgcgggcgccaacacagtagccgacacgctgctcatgggccactggcatgcaatgcaaaaccagactttgctaacacagctgagaaatgagattttgactgtctggcccgacatcgacaaacagccatccttgacagatctcgagaccttaccactcctcacggcaactatcaaagaatctctgcgctttattccatctggcgtatcgctaacgcgtgtcgtaccaccaggcggcgctgtgatagcagggcaacagatccccggtgggacggtggtggggatggctatcttacatgtgcatcagagcgcggaagtatggggtacggatgcgcttatgttccgaccggaacggtggctggagagttcagatcaggcaagtgcccggaatgggaagagtgaattggatcactggctcgttgctttcagtcgggggccgcgtatgtgtttcggtatgaacttggcttgggcggagatgtacatcgctttcgcgactatggttcggaactttgacatgactattgacggcacaacggccgaggatatgcaatggcgagagtgcattgcagcttactatcctaataggcatttgcatgcgtggtgtcggccggctgggcccgggaaggtgaagtaaagagttggtgcttatatagctttgagtttatgagcaaatacaaactttctcacacgagcaaagtttctatcctctaatatctagccttatgttaggaacaaaattgtaagaccccggtcgaaagaaaataatgggctcgtattttgaatacgcctgcgggtttttactaccacaagtcactatcataaacatagcagacaactagcgaatttctttctcataaccaggtttcgccatacttgatagttctatatgtctaggaaagaaacgaaacagggctttgagagccaatatattctagaatatcagatccctaataaatgccctagtctttcccctatttgcaacaaattccttttttatagtttgcaagctagaacggagttactaaggtcaaggtgagactcactcatcaaagtcggccgctatacttggccgctcctccgatgcttaatagttctgaccagtttcggggggaaagagaaaaaggaacattataaagtccgatgtgctgatttgcgatgttttgcactcttagtatcacggagtagtactcgagtttaggtaggcttatatattcaaaatttccaccaatgactttgataagctaggacttgagtgttatgcccactatcgtcatagaattccaccatcgtcgtgtcgaccacaaagtctgcacgtgaaataggaaagtaataagagaagcaggaaggtctcatatgctacctaatataaccaacccatggcaacaaagagcggaccgacaagcattgcttcagtgtaaccatacatttattaatcgtactctaaacgaaaaaaagccaaatatgtccctgagagcccagagtcaattgtttagaccgtaaccctattagccttcaaatactcataatccggcatagaatctcgcgtggccttctcaagcaactcagcaatctcatccccaaactcgacacgccacttagcaacttcctcatcaatatcaactgacactggagccttgtccttaacaacaccagtcgactcctgcaaagtcgacaacatgatagaaacggtattcttacgaaacgctagctccccaggctcaccaacgtttgtactttcagtcgtctcggattttttcgcagagccagtccactcaaactgcatggacgcagtgtccagaccaaccttctcacagaacctaatcacagcaccgcggttatgaatcacgtcattggcatcaatgaccaaaggcgcgacagactcatcgggctgctcgagacaccaatcgaataacttccgcgtccattccatgctcatattcttgaccgacacacccttaacgtcgtcgtcttcaatgacaccggctttagacatcttctgcatagcacggtacatagatggccaagctagtgccgggtgacggatgatgaaggccagctgccaggtgcgcaggtactcgtccggcatgacagttttgttattggcagagaatgtctgcgagggcccgtagcgttctggcgtggatacattgaactctttcgcgttctcttgctcttcggcgctgtttatgtttcccgtgaagaagcgagggttgaggaaccagaaggcgtgttctttggcaaacattatcttgttgtcggcacgcgctcggctggagtagtcttctagctcgttgaagcaccgttggatggcggctttggtctcgctcttctcatctactgtccattgttctagcggcttgccgatgcgaccattctcgctggctgtcatgaatgcatcgtagaagaagtagcctcccttcgggttggtgaggacattcggttgtttggggatgttgaggatcttcaggagaagattcgaggcggtgcgaggcacactgacgataaggactcggtgtggttgatcattgttctcaggggtattggtagtaacagccatggtggatggctttttgatgtataggatatggtggctgaatgataattaagcttaacttgccgcgaggcaatgagcgtgagaagagatggctacattctggagtcggatggtgtcatctcacttaaatagattcgactcaccctgaccaagcgcaagatcggcgcttttcttgaccaaatttcccctggcccctctttatgcatgcaagtgggccgaattctgacctctatgtggtattcgaagtccgacgcggcgggggttgagcagatagtatttcctaagggagtcggactcggtatcaaccgctccgatcggtgtttgtcgctgttgataaacgccgagagagggtcgacgatgaggtccttgattggactgcagaagtgatcggcaatttacatcttgaagaaacagcaatggtacgaggtatgtctcagacctcggccttcctatcggaggatatgatcagtcgcgtcggatgatacggtccgtggtcactgatcgacatggttttaccttgagttatacacttacgttatgcattcatctgtcaaacatctgtacgtcgtgaatacaggcagtggcagtgtagagtggagcagcaagatttgaaaaattgaggatatttttgattcttaaggctggtctggagcctcgaaggcctagtcagagacaaacacagctagatatcgagttcgaagtacaacatatgaaccgctaaaggtccggtgtctatgacttgacaaggttatcttgtagatatactaagccaatacactaaagcatacgtttccgcaagatatatcaagtcaaacccggctcttactaaacgtactttcaccgaggaaagtcggaatcaccgctctcactctccgccttaaccagactctgctccctcgtgagtgtcgggttgcgaataactaaggcgaaggcaatcaaagggactgttaagcagatacccgtaatacatagcagacgctgtgttttctggtaggcgagaatgacgttgtctcggttgggagtacccacgggattgaccgccgcaaatgcaagaggctgggcgtagacatacgcagcgagtgtttcgttgccgagtctatgattcagttcagaaggcaagacttggttccagatcgcaccggagacagtatttccaagtgcgctgccgatgttgtaagcggcgaggtagataccagttatcacggcaagatctatgggattgttagccctagagtcttttttttttggtagaacaaagcccgttggcgagtactaacgttcgtgcttagacgcaacctgaatgctggcttgagctgggtaagggaacattccaccagctagaaattttcgttagatatattcaagcaacgctggaatctaggtgataactcaccaatacccagcagaacttgcgcaccaatgacgcctgaatgactggagtgcgcaacaccacctcggaaatagatgaggattccgaatgcaaccatgaagaggagggttccggccacgatgaagggcttcaattggcgaactttcataacaatgaggccgagaataacgccagtaataacagaaacaaaactgtaaagagatgtgatccgagtcgcactgagaattgattcgtcgaagctcacgtagagaactgtgtacaggaaatctccttgcaggtaccacgctacacaaatgttaaatctcgaccatggatggatggtatcctgaaggacgtaccagtgttgagcataatggggattccaagggcgccccagacagcacggtctttgagaagctagagtcgaattaaatcggtaagaatcctaaatggcttcaatcatttgacttaccttgaatggcagcatcgggtattggcaggttctctcccagaaaatccagaccgggatcagcaaaaagcctatgataagtggcgcaattaccttcgctgtcttccactgtgcacttacgcctccagcgagggtgaatggaacaagaatacatgccagcatggcaatcaacagaatgtttccgacgatgtccagatgccagaacagttctacagccagtttcttttttcctagcagctggagagagctcttgtaagattcaagtgccccagtcttcttcgcgcgtcggttgacgataaaaaggactgcaataagagggagagcacatgcgggatagattatagcaaacatgccgatgccccatcgccatgtggtgatcttgagaacggcatctgtcaagttgccgctgatccaggtattgatctaaaggagattcagtaaattaatcagttagcgtgtaggattacgtatcgtacgcacaataaacggcaaggccgggatgtaggagaaaagaagacgagatcggctggaagtcacatcggcgattagaacttcgactagaagcataatactggtgtatccaatctagacaatattagacacgggccaagatttcatgagcgtatatctcacctggtagataacagcccccgcagcgaaagcctccaaagtcgttgcgcatgcctccactatagtacccacggtatagaagacgatcgaaagaaggataagttccactctgccgaatacatctgcaacctttgccgcagtgggctgtaaaagaatagtcagctgctgtgatgaattgttggtctctggatatccgtacctgtgcagcagcagcgatgacggctcggagaacattgatggtcgcaagaagactgtgttcgccgtaactctgagtagcatagggctgttcaagacatgaggtgttagtatactccattctcgtcgatatatcttgacgtcagaactgcgagatacgtacctggtacgtgtaacgaacagttccatccaagccatacacataagcgatcaagaaaatagcaataaagaggaagatccgatcccaaaatcggaagtgtgatgtaatgatttcgatacgacgaacacccggactgcctttgcctagcaggctgacaggctcaccaagcgggatggcttggttgcggggctccttcgagtcctcactgacgcggtggtcaacgttggtctcattaacgagggacataataatcgtgcagaatcaggtctcactcggattacctatgtagagaggaagaacataggggaaagaccagaaaaatgaaaatatgactgccaagaaaaaaagtctaagataaaactgcttcctcaatcttatctgatgggcctgtcacctgtctaggtaggtaccgaggcgcgctaggagcgtttgcctgggaaaacgtccactcacgcagctttcatgtggcccacctcgtatagagccatggctcaggcttgctatttgacacagatttcccgctttgggcttggctagtggcaattagtataagtctgtggatattgtatcggatgacttcctattctagcataacaacctcgggtcttaggtgaacgtgaagagaagatgtcatgagtgggcgactaactgtcttggtatactgttataagccatctatgtgaactatgtccttgttttgcaaagtgtatacataacaagaagaaataaagtgaaccctgttgaaccctgtccaggtggagctggccccggattaaatccattacgtaagaataatgcccgcaccacatggctggacgcgtcttggcggccgtgaaagcccacaacatatcagcaggctcgcacggacatgcaaatcttttcatcaaaatattaaccatgttatatagcagtctgtacggttaaggcaggtagagaatgctcgccgttttgccaatactgtgtccagtcgcccaaacttggcagcacttgtcaaaggagtgcgacatgccggtgatatgggctttgcagactttgctggctactccgactttctacgaagcgctcaccaaattgaaaaacctacaaaccctggccatgagagatactctccgcccaactaacgagtacacgccacaggcggcattactggcagtgcttaccgaaatttactaggaggcccaggactcacgggtgagcaattggtgtttggaagatttcatgatggagatggatgatcaaggttaccctcttggcgatgcgttggatccgtttggccttgattccatccttgtgaagtggacttttcactccaaggctgggcgcaagagctggccgagtccacatatttcagccgagactacctcaaggacttgattcccgcactgcgaacatgtaagttgcccaatttcggggcttgtcgaaaatatctattcttacataggaccggtcatattggaactgattctcctgacctatcactcttctatcgattttaataaggaaatcttcacactgccacatttgcaaaaactctgcatcactggcgctaaattttgaaaatttgggttgcaagaagcatcaattgacaatcgtgccgcaagtctaaaagagttgctgcttctcaactgttgtgtgtccgctgaagatctcacgctcatcgttcgatttccacgtgccttggaacggcttaccattagagttcctatgtcactaaaatctcagtacgaggaagacaattatgtattcttctctgggagattgagtttccaacattctgaatccttggagtacttggatttagacatttatgggggcgcagatcacggccttgacctcaacccctttgatgttctcaaagaaatcataatcacccctcattcaatacttggtgatcccgatgaaaaaatgatcatggcacgtagtctccagcgacttacaattcgatacgaggaagggactcgtctaccactgaattctatcctcgaagagctcgagaagaagaaccttcccaatatgcgctctgtgatatgccagatacccgacaatatctgcgaaggtactaccagctcggagatatgcgtcgaggccgaggctttcaaaccaaattccaaagagttaggggtggagctatcaacagaactcgttccataccctctcaccatgccgaaatacgatacctgcccgtgtgaaaacttaacgttcttccatcaattcccctcccatccccgtgtcaaatctcgcccaccaaacgaacatactaccaatacaaccgatgcgggtcacagcaaccctcatcccgctggtgtgatttccttcgatgactatgacccatattatgatgacccatacgagggtaaccatccttccttgtatgacatgagcccacctactcctccccgaatgcctacctttacggattacgatgactattgtgattgggcgtacgattgttgactggaggaaatctccgtcttctctttcagggcgtgccttttaacggtacctatttgtttgtttgtttgtttgtttgtttgtttgtttatcctatattctatcttcggtctttcttcaataaccttcaacatatatttggctacgcgccgccgtgcggattgatgctaacggcgtagcggcctgaagtatgtctacgtctgatttctaggatatccttgatggagtctttgatataactggaagccgtgtctgttctagaaaagtacaagatccagatatgttgtagaattcaggcttacatgtgcgaggataaatatgaagcgaagttggacaattgcaataaaacttggctgtaagtattgcctggagatgaaagcaattaaacctatatttgaggacattatcactatcaaagtcgtgacctgaatgaaccttgtgaaccaatcggcgaaggcaagctatcctgactgagacgattcatctcgggatcataaagcgactctgcctcaacagtcgccttgatgcgctttccaaaatactcgatctctactgtctcaccttcaccaacacccccaggaagccaggcgtaggcaatcggtttgcgaatcgtgtatccaaatgcagcggtggtgacatatccagccgcctttccattatagaacaccggctccttgccaaggatcatcgaccgaccatcatcaacggtcaaagcccgcagtcgccgcgaaggtacttggttggaaaggcgctgaatagcggctttgccgacgaagtcatctttcttatttgcatcgacagcaaatgaaacaccagcctcgaacggattgtgctctgtcgtcatatccgcgccgtaggtccggtatcccttctcgaggcgcattgagttgaacgcactgcgacctccagcaatgagtccgtgtagctttccagcttgccaaattgtgtcccataggcgctggccatactcggcgctggtttggatttcccaacctagttcgccgacataggactttcggatcattgtaacagggatacccgcgagaattgttttcttcaaagtgaagtagggaagtcccttgttggaaacgtcgaccgtgctgattccagcgataacatcccgggatcgaggaccccacagtccgatgcagcatgtgctgcctgtgatatcgcggacctgggtccatttcccgggggcaccttgttcctggactcgagcttctctggtaagatacgccagatctgttgcagtgttcgctccaatttggaacacatcgtcgtcaagtcggagtacaaaaatgtcaccccgaatgccaccgtgatcattcaggaggagcgtataagtaacggttcctatcttggtggtcatgtcactcgtagtgaggcgctgaagcagaccgattgctccgggaccgcgcacctcgaaccgatggaaagcagtcatatcaaacatagcaacagcattccgcgtcttccacgcttcagcggcagagatcggcgaatggaactgcgccgaccaggcatctcgttcgacaggttgccatgatggcgggagagatttgacaagatctttgtttgcctcataccaccacggccgctcccagcctccaacctcgaggaagaaagcccccagctccagctggcgaggatagaatggactcacacgcaaattgcggggcgacgtacgcggctgaagtgggtggacgatgtcatatatttcaacgaagttctgctgcgcggtctcgctcacgtagtctcgattgagttggatttcttcgaagcgggatagctcacattcagacacgtcgatatccgatcggccggttgtaagtatttgggctagagctcgggcgacgcctgctgagtgtgtaacccatacggcctcggcgacgtagaagccgtcgaggtgggatggttggccgaggattgggccaccgtcgggtgtgaaggaaaatatgccattgaaaccatctgcgatctctgtgtcccttagagcggggagaagctcttgggaatctttccaagccgggtcgaaatcttcggttgtgaaatcaaggcgggaaggcatgttttgttcgtcaacatctttcggagtaaggcccaatgatgacgcaacgacgggcattggacggtgtgcgtaggatccaatgccgtactgcccgccgtgttcacggtagtaaagacgcttgtcctggtgccggaggattggtagtgcggcattcattccattgggcaagctgttaacatctcgtccttcgagagcaggtactgccgtagtctttgcatactggtgccccagcgggagcaaaggaatttccacaccgaccatggctcccaattcaacaccccagaacccagcgcaagaaacaacaatgtctgcggggatagtgccctttggagtagtgactccggtgacacgtcgaccgtccctctcaatccccgtcacgggggtatggcccagataacgaacaccggccttgctcgtccgttcaatcagcagttgcgttgctcgggctgctagtgcgagaccatcggtcgggacgtgcagaccgcccaacaccatatcggtattcagatgaggatacatcttgaagcactcctcggcgctcagtagccgcgccccgattccccatgatgaggcgtatccatgtttccgcttcagctcctccagtcgtgcgggagttgttgctatttcgagactgccgacctgattgaagcatttgtgtccatccttctctattgaaagaagcttctcggctgtgtatcgtgcgaagtatgtcattgtcttggaggggcttgtctggaatacgagtccgggggcgtgtgaggtcgatccgcccggcatatgcaacgggccctgctcgacaacagtaatatccttccatcctcgagagaccaactcgtcggcgaggttggtacccacgatgcccgctccaatgatgacgacacgttgtgaaagggacattgttatgtgatatatgatagttaggtgttacacgcattagaaagcggcaggcaccgcttctatttgtatattcatatacttgataggttgtacaatatgtgaaattctggtacgtatctccccgcaccgtgtatcggtgtgtgataagtatatagtgtgtcttgaagctgacgataaagatattacaccccgcacgggttccggcgatgtaaagccgagaattgtagtaaagaataccgatgccattttcggagcaatcggaatggaggggtatatcgttggatgccccacgttcctatagataatgaagcttgtcaagtcaatcagaaccggccaaccagctttatgtggagcatttgcgttgacaatggataacatttccttttcgggtcaagggtctcaatcttaggctattttaggatgaagggagcgtcataatttccgcattgaagttagaattattggtttgcaatcaaagccgcatcaaattacagcaagtcaagtctacatgttggacggtttatggccgaaagtcgcgttctgaaggccacgaaagcagtgtatcgatccgggtcatactttgaagaaagcaggagtgtgccaaacatattgtagggctttgaactatatatattgagttaatactaatagatagctagttgaatctaatcactagctatccagttattttacaggagatccgtaggaaatagcaagactcagtctatttgagatacacttactgcttgtctacgtagaacggcgaactctgtgcacgcatacacgcacttaacttgtgcctagaagacgctgtaaacgagttcctataagcacgataacttcatggacagtgctgaaagaggcgatcatataccctcactatcaagcttttccgttgtagtcgattgcgaaaataaccattctagttagtttacaaacacagacccacagtctcgattgaccatagcgtatggtaaaagttcttgattgccctagcaatctccggagattcagttaaaacgtcaaacttgtggtctacaactagtatttaagcaacggtatccgagctttaaacggatctaaatgtttagattcgagctagctacttatagtaagataataggtgatcgtgcaataaatcgttggtaatgaagcattgtcattggcagaacattccaacatcatagacgaaaatgatgcaatcgccattctatggcctctgattggccaattgagaatggatgcaggtgcgttcaatggaggcgtggagtatacaaatcggttgcttatagttctggatgtgacatgtatcgccaacatctctgtctatgaacttttatgatacttaatgatgtcctaaagaacatgctaacccccaaactatgcggggctgatgttcgatgttcggcgggagccgatccgtgggggaacccaacaagaaacaatccatctgagaccttcaccctttctcaagagaaacacctcagctggaggacagcaatgctatcatctgcattcttcgcccatttctcatcatgaccgagcctggccaaactcctattcccgaggagccacctaacgcaatcctgaccgactcccacccgactcccgctcgcgacgcccgcgatgacaacctggaagcattagagctccatgagatccaaacgcgagaagacaatgagctagactactcaaccccatcaggttcatctggcgacgagaaccacgtgcccacacatcgaactacgtctcaacgggattcccggcggagacgcgaagcccgcaagggcctttggagccagatctgtcgattctggactcgaaatgttagtataactgtgccgcagaagagcaatcgagatcactttggtatgttgtactttggacacgctgttggcactctagttgacatgttcaaagccctggaaaggacgttccttgcgtacatccgcacgtccatggttatcgctatgcaaggggtgcttgttgctcaacttttccgtctacaacggccgttggaaacggtccatcgcctgtcattctaccatgtcggtatcccgcttgcggttgcctgtcatgccgtggctgttatcgtcgccttgataggttcattccgattctggagacaacaaaatgctattgctcgtggcaaagtttatgctggggggtgggaattaaattcagtggggattttactattccttgtaagtcatcactaggacgatgctcggcctctgaattctaaccaactctacaggtcattgtggcgactttggtacttaccgtgattatcttgattgaaaccaacttgagccccagtgttctttctaatcgaatatcatggccttgatgtccattgaaatggtgaaggaaaattttacccaagatgagcacattaatgagcatacataatacataatgaataattcatacttgtgatattattctatgatccgcatgtttttcaaatccattgccgttcaaagctgtctcgctttgtcgcagattgcattcatttctaccttcgagcgttctgttcaatgagatcctcaatgggaacaagcgttctctaggaaagttgcgtgaaccttacctacttgttggggacgcctcccaaacagccacctagcctgcgtcttctggtggcattccctcccgagcatgaatatttgcgccgtgttggcatccccaggcagcactaccctgtcacccattgggcaagggcaagaagaagcgtatgggtgggtatcttttatacataatcaacattccatatccccgagtatggtgacgtttaaactgcctacggccctacttagggcatatattacgctccaaccccccgaatcaacctcaattacttcgacacccagtagctggcacattaccttcaacataatcacacccattggctgtgttttcatgcttcttgatcctgctatgagtaacaccaatggcactgccagatcccaaagtcctgctgcaggtgaaaccaagcgaagcaaccatgcaatgtaagaaaaggataacaattagcatgccggtggttttccgcctctgtcaggtggagagaatgttacgctttttcttcatgatcatcgaaaggaaaatgagaaagaaccgcagtcttctccatatccgtgcttgaatattccatcaaaccatccttgatgctctggatgacagctctactccgttcaagttcatcctcatctgaaacccagccaagggcatctgtcccgattagatccctcatctcgcccaattcccgtagtttctcctgttcttggcgataatccgccgaacatttctgtatctcttcctcagaaaagtgaattggacactcagcagatcttgtctgtgctcctccatctagcgacataggccaattcttgaggacctgtagcataacatactttaatgaggtagagtctccctcccacggagcctgtgcatgatgaaaaagcttcgctcgaagcatataattttcggttctgatggcgtcaaaatgatccggtagggatttcatggtcaatgcagtataatagaaatggacgatccgtctccgcatcgtctcttgaacagtttcctgttctttatcgctgagttgatcaaaatttgccggcagcttgacctctggcttagacaatgtctcggataatggatcgccccagttttgaaaatgttcggggattccagcgcataaacagaggggtagaattactgcatgttgccagtcaatgacccctaccatatcattagacgtattcaccaagatattattaggtgaaaagtccggatggcgaagagtcgggcgagacatacggcctgataggacgtcgaggtagggcgctaacttcaaataattggcaaggagatattggtatagaataggcgagaggctttggaactggtatatttctcgtagatatctttcgacgtgtaggcgtggtttaccaaatcttttatagaattctatctcgcgctttgcgggtgcttcgaagtatgcggaaaaggtagtccctggctcaaagtcaatattactaaagaaataggaactcctagatagagacttacatgggccacggtcaacctctagagaggcccgttcttgataccaccattcatgctgtacagttggtccaacgacaatatcgtctgagattgggataaagtgttgtgagctgtcgagatcacggcggtaataaagacttccgcttgctgggaagtggatactcataaaccgtctctccatattaacaatctgtctcattattttgacccgagttttggtatccatagagaaccactggtcacttaaggggattccttcaagcctttcaagtagaatatattcagttctaacgggatttgtctgatctggagaatacgcaaggactttaggggctgggaccccatgagcacgtagatgtgtgagtgtggcagcttcgctagccaccacataatgtttcggaatagtagtcttgtatggcaaccttgcaagaactgcatatccatcattgaaggtgagttgcaagacgcggttgaagcccccctcggcgagttttgtgatcgaggctacgccatcgaggcgtcgaccaacagaatggcaggctgcccttacaagggcatccacgtcaaattgaatacagcgttcagcgcggcggagcttttcattaaatctagtttaacggagcaagttagtttatcgcaattgacgcgttcagcaaccgtcacgactcacaaaaagcgcccagaagtgtactcgaacagatcagaattactactcatagaggacattcttctgggtaatgacttcgggtatcgaccccaaaacctcgagaagcgtcgcattttcaaggagagggccagggtacgcacccagctacatttccaagcttaactttaagttacccgtggacccgccaacatgggtattactcagcactaacgcctcaggtgcccaccgatagacccttgtttccaaggggtcaagtgctgaatcagcatatggccggcctctgtatgttgtgtaacgtgccaggtctaaaagagaacagtgcattcaattcaaaataactaagatggagagaaataagaagcaagttggaaagtgggcagcagccagttaatatagctgaccacttccaagcgttgcaaacctcgaacatctcgttcagctatgtaacaaacaatctatctggtaaacaatgcaaacagtaggcgagcaagcaaacatgaagcatatgatagcgatccatgtggattgtgacatgttgtagttaattattttgcgatgaggaatctagctagaagggccacgctcaagaataaacattgtaaagccctatggattaagaaacacttttggtcttttctaatgaagatacaaaatacaccgatattttctaatgaagatacaaaatacaccgatatcctttcaaatggtcagcgattagaactctatggtacaatatgaggactctcatatgatactcgggccacattgggctaagtattctaagaagttggtaaccaactatctgacgcagaaaggtaggtcaggtcatcagatttagcacgagggatatggtatggacatcaatcgcaccaccattgcactacctgactgattgcagtggcccgtataatagaccaaaagaagacgttcagaccaatcatcactgtagcaggggttcttgcagttgaatggggctgggcaaggctaagctccggaaaatgccttttatcttctattctctgttcattcaatgaaaagcaatatactgtcttcgaaaaacatatgagagtcctagattcatcaaactaaatggatacaagacccagaaggtttcaggcgacgatagccttccttctcatctcttctcctctcctcctccctcttctctttgctgtgttatcaaatgaccattttccttgacgactaggactgccttgtcacagtgagaatggaacttacaaagctttgtaaatgtaggaatagctaactgcccataagccatgcgaagaggccagatgatatttatagggattatgacaggacggcataagttacatatcgatgtagacgaacgaagtaactgggacctgctttgcatcatacacatggtcagtttattatgagttgagttttctaccaccgaaattgtatgctcgtcactacaaagtacacacgtactgcatatatttttatgaagaaagattatttggccgaagatgcatcggaacaaaccttcccgagctctatcgaactatgttgtataataataatcggccaagccaccgaacaaaatttgacgtcggcgctcggttcccgttcgaaaccgtttcaaatagaaacgccccataaggtcctgtaaggcgagacgatcattcacccagccccatttcgaattccgacctttccgacgcagtgaacatcgacgattcttgccacttcgggcattagaccaggacatttgtaggcagcaaaggcatccttcctatacgatgtcggatcggcgagccgtgccgtcacatagcaccgtgaaatactacaagatttgtacattgtacgttgtccctacattgtaagctcagctgtctaccggaagccctcggtccgcaagcggagctaactggaccccgcggcattcgaagcggagactcatgccgggcatgggagtgtggaacaggttatcgtcaaaacgggctgataccgcaataacccaatacgaagtacggagtacggaggagaagaaagccacaacgctcaggggctggatgttgctcggattggcagttgatagcaaaaggtacgttgaatgagggaggtggggactccttatggacacttgtcagatgctctcgcagacaaggcggtccgagatacctaaaaaggactactggtcatgtcgatgtattccaatactcgcttatttagtttcttggcgcgcattgggccgctcggatttccccaaatgcgttgcttcacgagggtgggcttcttggcaagtggcgatccagccttattttttggatgtggatgtcttggctctttcaggggaaagataacgggtcatttttggactcgtttttggtaataccatatttgaattgatggctgttttagtaggacctcggaagtcaagagttgtcacgcctcctttttcccttctggggttaattttcaaagcgagtcatgggacttgagttcatctggggtatttggccatagccgcttgggcaggctgcatcacttacgtgtctagcaagttgggtttcattatcattggttttatacaagtcattcgggtattgattttatgttcatatgtacatccgaaattatccacagtcactgatagttctcggcttcgttgtctccatttcatagagaacagaagccagagagagaaaaatgaaacaccaagaatgatctgagcaaatatgataaaagtatgctgaaaggaaagaatcaaaatgtgaatcatagaaaagaaaatgcaagatatgagaaataaaacagagtgtcatatagacacttgacagaaagcgaagaccgccagggcattgcttcttaagaaatcattccaacgtctttaccaaaacgctccaaaattaagctgtctgcataggaatgctagtcatgggcagctggggcggggcctgctcaccctcctcgaacatccacttctccaatttttgcgccatgcgtgcgcagaaggggtcaacatatccagtccacaaggtggcgcagaagtagaccagcacgatccaagcggggatactgatggccacgacccaaggggcgcggatggggatccagtgcgggtggaggggttcgccgtcctcgccgtatatcgggttgcccttttcgtcgacaatgtcaccgtcccagggctggccggtaatgccgtaaagcatccagcaaagaacagtgcgcaagagagtgccgtgcacgaggtaaacggcgaaactctgcttgccgagccagaggaggagacggctggagaggaattccttggtggagggagagatgtagatggcgaaaattatgaggtcgacgcccaaagcggagtagcgtctgccgacgttgacctccggaggaaagatatagtgagaggcccgttccatgtaggccgaccatgtagcccattctgggtgttctccggggtacgagcacacgaagagaccgaggcagaccaagaggcctgctacgatcttgcgaccccagctgtggcgttcgacgaattctttgaaaccgttctcataagagagatcgctgaggaacatgccgtaaactgcctgcatttggaaggtttctgtctcttgattaggaccaggggtggggatttgggtttcgcgtagaacttaccggtgttcttggctgcgttctggtggaagtagaggtacatgcctacgtagatggccatgcggaatcggaacttgcagaacattgtcgcgcagataaggacgtaaaccagcatagatgcctggagcagcggaagtaaagcccactggtggtcatcgtacgccatatagcccgtggtccaaacttccaggaaggtcttgaacaaccgcacaaactcctcccagaaagtaggcgccagatcgacggcggcgtaacggcaccaccaacagtcggatcgattagcggcgacgaaggcgccaaattgtgccatgacccacgagatgagcaaggcgatagtagcggggaagatgaggcgaggtggacgacggaaggcactcttgcccacggatgtgaaggatccaaggatgtcgccattgcgagactgtttgagcggcttgagggcacaaacgtagccagtcaggaaggcgaagattgtgacacccaaacggccttgccaaggaatacgcaagacgggccactgcagaattcggggaggggagtcaacatcgtcgcggggggcaaagagatcataatcccatccgcgggtcaggtgagtgaggataactaggaatgaagcgattcctcgtaggccctatccacgatgttagtaacaagcctcatccctataaggctgagatagataacgcacatcaatccacttcacacttttccgcggatcacctttcaccgatggatctgcggacttccagggaatgttgtccaatatgcgcgagtatagatgggtgggctgaatatactccatgatgagtgttgtaaagagtgaatgagaaaccaaacaagtccgacaggagactcggagtgtctagtggattggttgaaatggaaagccaaatgcaaccatcaacatcgaacgacaaagctcacaaaatgccaaacaaaacaaaccaaaatgctgaagattcaaaggagagaggaagggacagagatgaggttagctcaagttactgagagagcctccccatagatcaacgagcgagaagtttcgaaaataaataggccaagacagcagaacggggtatatgtaagagaaagccgaattcatcttccctttcccacgagtcgcggatcttggccaagcggaaaatgggtacgaggcgatcgaatgggcgtgaactggaacttgggggatttaccttgttgtatgtaggtatcgccgtggggcctcggtagtggagccttgaaattaccagttcaatacctgtgaagatggcgaaaatgacgaagtgacgaaagtgaagtaaagtatacgatgcctaaatataactggaggggttgtgccatgttatgtttgcagttatgtaaatgtcgataaatgatactacatcagaaaagagctggatatacgtatattgtatgtatcaatctacaacatagggatgagtattgcctccatagttacagcatatgtacgaatactccgtactcgtacgccatacgccatacgcatacaaacaagggaaggggcgtaaattgaagctatctccagccacgaactaaaccatcttatgtagaagctgacgacgctctgcgcatcaattgagctagtatcccatctgccaatcaacacgctgtattttccccatatgaaccatgggctaaaggccgcctcaaattacgccagatcttggcattgatcccacgcagcccaggtctgcaacctgattggccagggcaatcccaacggcaaatcggaatcggggcttccaattgatttaatttctttttctggaattcgatgcgcactggcgttaacgctataccacttcgattcggagtaaggggatggaatgcaaccttggaagttcacccctatttcttatttccgccaaatacgagaacgagagggcatttcagtcgggtacatcctatgctgtatggatgtatgaatgtatgggtgttgtatatcttctatggatgtgatatggagtacgttgtacaaagcactccatatggagtaagtcatcacgttatctgacactcggactccgtgaagatcgctggtacctcgggaacttttcgaatatcaccgtgaacgcaggaatggtaaataagagccattggattctacagataacaacattccgtccctgggaatgtaccgttgaacttgatttgaaccgaatgaatttgaaacatatattgtaactcaataatttcgtattcaaccaaccaggcggagcaaactcttggcttcagtcttcagactctactccgtactccatagagctcacgagactattgaaaaacgggtctactcaatcacatgacaacgttgaagctggctattttaggtgatattaattacttggtaagcttctcaatcttaatttagttattacaagtcaataaaatagcatagttttactccgaggatacgtaagtggtgcacagcaaaaaaaaaagacctcagccctatcatcttcctgcgactgtgtcccgtacaacatacgtgttagtacgaagtctctttgtctctcggtccttggcgacccatttatttagaaaaccgaaagtctaagcggttttcggtaccccgtagtacatattcatgttatggtacaagatcgtctgccttgtggtcagaggtcggcagccaagagtttcccctgcatgacggggagatatgtgtggtggctgtcgcatttacgcatacggagtatctacgtattaactatctacaacatacacatacatagctaatccgtagtatgttctagaaccggcatattccgcctcgtgtggaccggtacccgcttttcctcaatccaaaaaggtttaagggtctcgggaaattgatcagatagggttctccaggacctccagggctgtcaggtatcatacccagtaatacacgtgacaatacacaggtgcttggcaaagtcgggtggtggcgggccaagatcacgcaattttagtctcaacccgacacatccatttagacccatctgaatttaccccctagttcaggagaacttgatggcttaggggtgtacgggacaagaatatccagaatccacaactttgtcacttccaaaatgcggcttgcacgtacatttacgaccttgctggcagctgtggttgcttcggccaccattctcgagaacggtcaagtgagagagaatgcatatcccggccagttacaaccggtgactttggacgattcatggaggaactatcccgcggatgccccggagatctcttacaaaggtcgatgggatagtcaacacatctcttgtatgttccccgctcctcttccccggattctggttttaaccttaatgctaaccttggaacgaacctcagggtggtcgtatgtatgactcgctattattttgtcggctttactaagtaatgatacagtgcaccgggaatcaaagtcgagttctctggggaaaaggtgcgtcttgtttactccgattaaccttaaaaatggggtccacatcgtaacatcattctagcttgccgtccacttcggcccaagcaccaacacgggtgttctggtggcctaccggtatgcatacatctcactctttatgtattcattgtgctaacccttgacaggattggctctcttgattggcaattctctaatatcaccgcctcctccacatatcaatttgttggtccgtggtcagagctcaaagatggtgatgaacccgtcgacaaaaatgtctttgagatgagaggtgtgtatcccaaattccagtggtaacctatatactaactgcattacagtcacaaattggggcattggataagtctctccctgtcgttcaatctgttcgttacttaccgtccacacagtccaaatcgctggtgttgctgtcgcgaatgacgccgtccttaccaaggccccgaccttcccaaagagagttgagattattgggggctcgtaagtttccacaccttgccagctagtcttccatgcaactaactgtccccaaggcttgcatctggacaatttgccacctacgagacaatctcctcgtggtccttcctcttcgctaacggcttaggaaatgtcgaatacggcatcacggtcagtccgctcccacctggatttctgaattccgaatatgctgacaagtctcgcaggcctatcccggcgtgtgtctcgccgatgaacaatgttacaacggcggctctcgcggtgtagtatgtcatcaacctcccatttcccctagaaaccccatcatcaactaacaacgccactagggatggtactggcaccgtgcctcggacccgggctctcgtgcgcgatcaatctacgaccgcaatcccgagaagtgggacgtcaaggcagagcaaccggccgatcttgtgatcattcagatgggcggtaacgatcatcgccatcccaacgaaatccccggcagggattactaccatgcctacgtcgacttggtcgaggatatccactctaactggcctaatgcaatcatcatcctcatggtatgtacctcttctattcacagcttggtctgtaaatggtccatccgactaacttcaacagtcccaatggggaggattcaccaaggaaggaaagaagtacgtcggtagcacttactaccaggaagagaccagggaagtcaatgagcacttcaaagaccgtggtttcgtctactatttccccaccgagggccttctgcagcataacgatatcaaccccaagaaccatcttacggatgtgggacatgttaagattgcgagtcacttgttgcagtgggttaagttggttctcaggtggaaccttgagcctacgggcgaagtccaatctggaactacctactggaacgatcagcaggaatactgattgttctgagatactgaaattggggccgggtggttatctggcctttgtacatttatttattgatactcggcgcggtgtagataaactgcaagaacatatagagcatatatggcgccttttggcattgtactttttgcgcatttaagtttcctattcgaagtcggttgaatatttattaatatttgaaaggaaggcatattattaggtaaagctcatatatataatatataaccgttgtcgtaatatatcacggggatcctcaaaattattccactttagagaccgttaggaccccataatccatggcggttctacctacccaaaacactcccaattccggtggcgcactctaacgagagagataataggagtgaaagtactatgtactatgcaccgctattacaaactagtgtttatccaaaaagcaaaaaaaaacaaaaagctggggacagagttattggatcgacgtccgtacccaagttgtttgtatgccgctattgattaccgcatctggatacctccaagaatagggcaggagtcatagtcaccaaaataggtaggtatagtaccaaagatattaaagtggtgaaagctatttcgatccaccccgtatcaactcaagcgttgaaatattgcatcaagcggggtagtgtgtgccttgccatctttatccgatctatgaatgtcatccccaggctgtgtgatgtggcttgcatcagtgtttacccaaacaggttaattctccaatttattttcgtggtctttcttcttttcctccgctgagagctccggtgtattcgaaattagctgcacatgtttatccagtggatagcgccgtaaaagactgactggcacccaacaatacttttgcggtgcacctttcaagaacccttccaagatggccttctccaagctgataggatgcttcaacatccatagcttgattatttcgtagccatatttggacttcttcgtacccgcgttgaattccgtattgccaatcccgccgtcttccggaacctcgcctggaattttccctggggatatgcgagcgacatacgcgatttgcttgacggggagagtggtgtagaaccagatgcggtgaaccttctgcgggagtaggtaaccacgatattcatggttcttcgcgccagacgcgatattgcccatgtgctcgggtttgatgctcatgaagatatctgagctcgattttgccattgcgagactcggcatgaagtgtccaactcaaaggtattagatgatctcttcgtggaattagaaatgtgcagcacagaaaaagctcaaaaggtttgatttggcggtgagtgctctaatccgaggtcagttggtagtctgatcggcgcccctcacagctgagaggatagtcacatttggcctgaacgcggatgaaaaacagactgtggaagagccagaaagtgctaattatccatctcaatttgctttttattgagattatcactgtgaatcagttggtgtttggggaaagcccaagtctccggaattttggccttgcgatgaaatagtcaaatctgtactccatacgagcaccaacacaagcctaacttccaataattcatgcaagtggctttcctctgtgccacgacaatgtttgagtcaggcaagacgacggagaatggtcaaataatagcatgcaccttgacttaggtcattggattgtgaagctggtcggcagcgcttattgtactgagacgtgggcctgaagatgtcatcacgggcggcccggcgcttcttagcgtgtgacgctcctactttgatgatgtgcatggaagttgggccatgggattgcactctttggtgtgtggtgggaaggacgactagggtcccggctcccgatggcctagtctccgaacttcggtccggtcgggatttatgtacatcggcctttctgggtggagatgagagttatgcatagatctgggatatagattgtataaaaagagatcgactgctcttgcaattctcataattctcaagtcgactctaacaaggtatctctacaaatacctaaattcaagactgaattgaatatctcctattcctcctattcctcctatcctttcccatcattttatgcccaatagggcaattgccgaggtatccagaacatttcattcgccaagccctttatgttcttcccaacgatccacatgccataaaaagattggtgctggagatcaaatagtcccaaccgttgttgttcgaccaatgctatatctcctgcaccgggataacttccacattaggcgactggccactggagcagattttcttgtctttcttcttttttttttttaagaacactggcatataacaagaccgggccaacaaagacttcaaacttgtcgcacttttgaagtaaagttagatcaaaactatccccttgcgcaggtattactctgcagcccatactttcacaatggttccaaaacccattccattcccgggcttcaccccgatatctgatcgagtataccttcgcaatggtcacgagaaggccaaaccagctccagccgacgagccaacaacgattatcatttccggctggggcgacggcatgccgaaacacgttaccaaatattccgacggctaccatgagctctacccatccgcgcggatcatcgttatcctatcgactaccttccaggccaccaaccaaccagaggaagccagaatccaggccatgatgccggtcgtcgacaccgtcttccctacgccaaccggcagcggaaacgaaaaggagcgccttctcctgcatgccatgtcaaatacaggcgccattttcactgcctccatcgtcgtcgcgtatcagcgacgctatggaacagacaagccattcccccacgagctcttagtgctggactccacgcctggaagtctggacttcacgtctcaggttacccggtggtcgcgtgccatggcggtcggcacggccaagttcttcccttggcccttcattatcacacatggtctgtggtatgctttcctctgggcgaatttcctgtggcaactcttgagcggttccgtgtcttcgggcgtttgggcggatggaatcataaatgataagtcttgcgtcgcggccggttctagcagggtttacctttactctaaggaagatgagattattggttacaaggatttggaggagaatgtcgcccatgccaggacattaggctattcggctgatcttgagatgtttgagggctcgccgcatgtcggccatatgagacttcatcctgaacaatattggaataaaatttccagctcatggaagcaggccattgcgaaataaggtaccctggggactggatatattgcattttgcatttatatttatagcttagaccatgtttaataattgtatagagcgatttcattgatagtctgattaatatcacttgctagtttccagaacaaggttgatctccgggatgtcgattaagccctgcgatccgctatatcggtacaagacttgtcttaggttatacttgtttatacaaaaggaactggcaagatattcaaaggtagcaattcgtaagtcaatagatcagcactaacaatctgggccttccaaggcaatgcgaaatgagtacacaaagacaacaccacatccactccactctggaggttcaacctaatcacgatcatcaggatggaaaaccaatgctcgcacttcaatactctctcttcccgcttcatgctccgtttccgggttaacaaaagcagtatggggcacacgacgagctcttccatcaaccttggaatcaaaacatttgataagtgtcaccaggtccggagtctgcccatagcggtaataccacttgatattcggatcgggcttgacggcatatgtctcaccttcgcggtctgggtatatgagcccgatgggaacaaggtcactatctgggactgagtgggcatccgccaccgccaatggatccttcaggatggttttgatcggacgccagacgttgatgatctggtatcggcccttgaggagctcgggagcctcgtctgggagatggtgggagactctgtttttggacgcagtgtaggattgatcaatgtgtacgcgctgcacaggtccgcggagctgggtagtaatggatctatcagtttgggcccgtcggatggtatggtcgaagatgaagatacgagaggcacccgtgctatgtaggtcattgttagtttcatttgagtgatgttgatggcttcaggagtgcatacgcgtctttaagtagttgttctgtttccgggtaatattctctcttgatcttctcatcgtctaggaagtctttctcttggctttcgtgatagtaaagctggaatccatggctgtctagcttgtagtccagctcatggccactgatatcgtggatggtggtcacgagaggaaccactggtcgatcataagtctctggtttgccaacataagatggtgccgggggagagccatcttcgttctctttgtagaagttgagtgtagcctggacatggtgaggcttttcggagactgggactctggggttttctgagagcagagagccgtgagaaccaggaagttgaacagctgcagaagccatagtgagttatttgcgttgtaatttaatggagcttggaacagatgacttcgatagatggttctttatatagcagtttgcggggtgagttctatttgtcagaatacagcacgcaatattcgtatgacatggagaaatgctgataaatgcatagctttgagggatacaagaatcaagtcgactggtaagccctgcagtagtaccagatggtacagatggaattatattattaattgacgtgcatatgccatttgtaatctcgcattccccggaagatcatttggtgattgagatgacgccactcgatatcgaatatacgaaaaacggcattggccaaatttaaccaagcattcattctaatgtagttgattgcatttctttctgggtaggcacagggtagatgtgatatgaaaccaacaatagtgcgctcctatgaagcccatctagtaatcacgtggtttatactcccatgagatgtgttaaaagatattaagtaaacagcataaaccacactctgcagttatagaggacttgtctttctatagatatttatcgctaatcttcctcgaagttatagaaatcgacctagcatggccaccaaggtcctccgcccaacaaagtcaaaagcaacgccgtctttcccctcctcggcagtctttcacccgcatcagatcacagcctcagcttttaataaatccaagcgggggctaataggatcactttatatttaagcaagcatccctagagtcttggtctattttaaaatccctgtgcttcatattatccaaccccatcaccatggcagtcatccaagcaaaatggaccaaagtcgtcgaggctgaggtcttacagcgatcgtcccaagtagtctccgtcattgacggacaggtttacatctttggcggggagttgcggccacgggagccgagagacaataacgttcacattgtttcacttggacgtcgtgagtctccctatttctacaaaaaaatcccaaatctgatgccagcgcatacaactaacagatcccatagccgcaaccctatctaccaagccatccaccgacaaatccccttcgccgcgagtcgggaccgcctcggcaaccctcaatggcaaaatctacctattctccggacgcgggggcgcagcaatggcaccggtagaagaaagtggcgctatttgggaattcaaccccgcctcagacgaatggtcactcctatcaccatccgacgcaaacccgtcctctatcccggcagcgcgcagctaccactgcacagccagcgacggcaaagacaccgtgtttatccacgcgggctgtccggagaagggccgtctatcagatctgtgggcattcagtgtatcccagaagcagtggacggaacttgcttcggcgccggatccaccacgcggtggaacctctattgcatttgcccagggtaggttgtatcggatgaatgggtttgatggggagcgggaacagggtggcagagtagatgtgtatgagcctgaaaccaatctgtggagctcgcactcgtttgtttcagatggtatgactggaccatcgccgcgaagtgtggcagccttgcttcctgttgttgtttctggccgtgtgtacttggtcactctgtttggtgagcaggatcctagttccttgggacatcagggtgccggaaaaatgttgggtgatgtgtggttatttgatgtagagacccagctatggaccaaggttgaggctcagggagatgagcgcccagacccacggggttggttcgatggcgatgtccttggtaatggcagtattgtggttcatgggggacttggagaatcaaataatcgactgggcgacctttggactctcgagtttgtctaatgttttgaagagatttagtttttcaagagaaaatcccgagggtattcaacatcaacaaaaaatgaaatttgtaggagaattatggagttttgaaaagaaaagaacaaagctaagagaaggttatgcgtcatgagcgtacagcgaaagcacaacaagtcaaaaggaaatcgtttgtgcgtgctatgaggtcttgaatcgtacagttgccatatttgcctgcgccattccgcaacaattcataagaaaagataatttgacagagcgaaagaaaagtcaacgagtcgcaccatacaccagcaccatgaggggaagtccggcggaaggaaatgaacaaaaagagtcaatgactgtcatcgcaaatcggaagcaaaaaaaaaggagaattgacatgaaacaggagaaagacctcggaaagacaaataaaaaaagtgtagtagttattgtgacaactgacatcatgcacaggagaagtgaaaaatgttctgcgttagagttctactcgtttttggagtattgcttagaacatgagagagcgggttttctgccgacgtgcttcgacagtacccatctcgggttgagaatgagtgtgcttgtgtcgaggacgtgaggattgaggcgccggcgccccagaccccgcagaagatggaggaggtgccatcatcgcactgttccggctccgaacaggagatggcagtgaggcaggtgctgtgggaatcccagtgggtggacgacgaggcgcagtctcattgctggctttcatgctacgctcacgcttgagcacaagatcagcccagggtttgagtgcaccattgccggagctagagcccttcccaacagcttcagacatgactcgaagccagccctccttatctgcggggctatccgcatagaagtcaatcacttcaccattaccaaaacggatgcggaatccctcttcaacaaacatgtagccatcctcttcttcggcgaatgcagacttgcgacgggtaccgcccttcgtgttggtctccttttgaagtaaagaggatcgatcgtcaatgagcttggaggccttggctagattaatggtagcacgaggttggcgcgttgtttcgtggaaggccgttaacttggatccttgaagcttaaagaagcgacggcgccagtactattgtgatggattagttttaaatcgacgatagaagacttcgtaagcacttacaggacaatctccgccctgttgggaaaggaacccttcccagcagcgagctgcaacactctctgcatcgcgcaattcacgaatacaggcattcatgctcttcggcatgtcttcatccttgctacctttcggcttaggcacgaatagaagttgcacttccaactttccaatcttataaggtggtcgacgctgcgtattaatgctagtcgcactcttcttgctcttgatgctgctcatctgttcctcaacggcccattcgttgaagcaagcaacatcaacaatgtggggacggccaaacgcctgctgctcgtggtcgcttaaagccacataagcgcggccaaagctaccatcacgtgcaaccaagtttcgaagccgttcgtatacgggagcattaacgtccttggccttctgttgctgcgactgcatttgttgcttaatgtcaagctccttgcgccgacgtggggatgcaaatacacggctgagggccgacgccttttggcgtgatggcgatgatgcgggttcttgggtttggaatttgctctcgtcaatcttcatttgcaaggtcaactggaactcaaggtcattctggacgatgagctcgaactcttgtccgattggagctgacttgcccatctccaaccaggaggtggtcacacagtgcagtccgttatccagggtcagtgcaaaatacgatcgttcacctacagttcggttagtgacagtcaattgcagtgggtactatgatagggtcttaccccgtgggagaggaaggtcacaatatttgaggcctatgaccttcacaaataaacgacctcgctcttctccatcttcaaacgattcggagatggttggctcgttctcttcaatggtggctggagcttcctgaacattgctgggctgtccagggagaggtgggactccacctatgccagggacgggctttttcttcgggataccggtggcagacttgatacttgggcgtcgcgctgagccattccaagggactgtggtccaggtctgttggctcgccttgcgtggagaagatccagcggagcgtgtaccgtgcggatcttgggcagtgtgttcggcagaaggcattgcttcttcttcgttacggctgctggcaatgatgactttcgtgttctgtctcatgaggtatcctctctgtttgggggtaggagagtcagcggggtgtgcactaattcctggggtcgcgggatccttgtgtcctattgcctgggaaggcagtaaggaactagggctttgggaaagggcaaggtggaatgcaaccttttgggattcaatgacacgatcaaactccttgtccagtccaaatccaaggctttcttcctggatactgaagggaatgtcgagtttcaaacaactactttgtcgctgggcaagagctgcgggccccagctttggtggcaagtcaatattttcatgttcgggatccgacgagtttgagtcgttggagatctgcttagtcaatgaaggagtgggtagagcgtgttggccactgatctgacggcgggtggcagccatcgactggatatccgcaggggtcagtgagggcctggtcttgaggccagcaccgggagctcggattgttgcgacagggtcaggaacagactcatcggatgagctctcatcatgttccggctctaactcctcttccccctctgcatcttcctcttcctgttcttcttcttcttcgtcgtcttcctcttcttcgtcctcttcttcattgtcgtgttcgatcggatgacgaatgacagagtctggagtagacgcttcggaagcttggtcctggtgcatctcgggggtaagagggcgtgcgagagactgacggatagatgccatatcgaaggactggttttgaggggcgtttggctctttgtattcctgggcaccctcgtttggctgtgcgggcttttcggcgtcggtgtgggtttcagcattgggggtagtctgtccagattcttgttcatgactatcatgcccagcgtgttcgcgatcggcggcttcggcagcagagcgtagcgagtaattgctggcctcatcgtacttggcccgttggtcacgggatgacaagctgttgtctgacctgctctgataataatccgtaatagagtaaaggtcttcatcgcgctcttcctctttaatgattacacttgaggagtcatcatcgtcggtctccgtggatggaatgggaacatcagggtcataatggtcataacgttgggggctggaagcaatttgagaagaggcatctgagctgtcatcctcataactatcacctttgcggattccccgcaagattgagtcgcgagaaatgcgaggtggagaaaagaagttatccttggcatcatctgcgtaagtatcatctttcgatgcaagcgtttcatctgctctaggaagctccaaggtttcctcgatactctcggcgtggtcatcatgtgtctcatcatcatctctctcttgcagcatcatgagacggagtctctcctctatggacccagcgccggggatatcagactttgtatatgcggcaggagctggaggcgtagggagcacacgctgtcccgcgctgccgatctcaaaagcggcagcgagcttatcagcagaggacggacgcgcgccagacatgcgattgaccgatggcaaaggcgggaggggacgtcgctcgccatttgagtccagcgactcgacgcgtgtgtgctgagaagatcctccttcacgtgaaataggtcgctcatcggcgctgtcttcttcgacgtcttcgatgaaaggatcgctatcactgtttgttgggctcataaaacgccagtcttcgggcaacacaacaggagttttctcagcatcttccagcgaggcgtcaaagctatcatcacgctcaatcgatgactcggcctcaaaactaagatccccctcttcttcggactcgtagctgttctcacgtgactcagatgcaactgaggagagatccggtgtcgtcatttcatattcgttgatttgagggggggcgtgatcaaaagtgacactctttgcatgtcgatgtccagcactgccatattcggaccaaatatcgttctggggatcgaatcccttgccataccgactacctttggatagcgaggacttgcttggcgatgcttggtctttgctcgaggatgacgggcgagacatttggctggtatcttcgtcgacttgggatttcgtaacattcatttggctgttccgttgcggagaccgctgcgagcctaatggtctctggggaaagaccaccgaagccgggtcatattcttgaccaccttcgaagaacttgttgttatttttgaccttcgacacgcgtttcaagttttcgagcgacgggcgctttgaggggaaataacacccctctggatcgtatggcgctttattctcggctccctttgggaacggcgatggggagtcccgacctttccaaaacaggcgaggggaggcattgttattcagagacgagacatcatatgcaggcgattcgccgtgtggcatctgctaggttgttagcatgcttgaccacatgcaaagcatcgcgttgacagtaccttggtaacttgattccagctaggcgaattgcgcctctgggccatggggctcacttcggagagtggccgttgaccaggtcccttagccatattgacgttgggtttgctggtgactcaggatgcgaagtgtgcaatcgtaaaacaagactaagacaggtgtctataatgtgtcagtgtttattcaccaagtcctgatcagcgaatgggttcacgactgatgacgaaggacataaggcaaacttgcccagagatcaggtaccatacgtttttaataaccaggagtcgcgtgggaaatagttgccagcgagtgctgatatattcgctgcaaaggcgtaaaggccgtgtcgatcgtggcaagaatgctgcggcaaagcgaaggtaccaaaacaaacccaagttgggtgtctaggtgtcaaaccaaggccgaaaaaaaggggaagggataacgaagggatacgaatgcaaactcccaaaaagaaaaaaaaatagcagggaagagcgacagagacaaagaaagaggttattcagaagagtagcagaaacaacgaagcttgatatgtctctcccatggattcaagtggattgttaccccaagcaagaaactgttgttgcgggagtcgtcatggcaacggcgcgattgtttcagcatcccgtgacattgcgtcaggtgcctccgatcggcgctagcctacaagtagaatagcctcgcggatcgttttcgatgtcaacatgcacctaccaccttcaactgttaaaagtacctaaatatagcacaagattgaatatgtaggaaaactcgaatttgggtatcggagtttcttatagagtcccactattcaaatgtgaagcacagctagaatttgatgtattgtttcctctttctaacaagtcaccatcgattatatgtcaagacaaccttgtaatatgtgtgaggtttgaatggcagcaaatatcttcaccaatagggtaggcatggagggctttaaaatagggaaggtatatctgtagagctcaatccaaggcaggagttactagagactcccaaggtgcaggcaaagctcacacgcatatatgaacttagacgaaaacaaaagccacgacaggccacttccttgtcaacctctctagcatccaccagactatagtggctttgaggtctgtagtagcatgctgaatccggatatatgaactcacccgagagcaagccgcgggggtgagtccgctcttaatatgtaggaatttggatggatccaggcaactatatattccgtagttatagatatgatttacctacaaataatttctctcagcaatatgacagattaccttgagctattggttttagtttctgagacgaatagtcgcacagatttagcacaacagaaaatatgagaagtgttggattactgagaccaccagtattgcaaacaaacatcaacaaacatgtttatgatgtactgagtcagcattttagtcacctgaccatatgccaaagtttgtgatctgcgctagtctgaaaaaggaatggcgttttatcatcgcggaaaaaaaacatctgaacctgttctggcctttccttttcgatcattcagcgttttccacttccgcgcatcttatcggttttaattaggtagaatgcctctgccagctcgctcttcgatatgttttctatgtcaaactaaggcgaccctgcttgccccgtcgattcttccgacgtcatggcagaccacacgaggcatggccaccgttcgattgcgtcgcaaggctgctcggatggccctgtcgcccactgtttccaaaccatctcttccatctcctaacaagccacgacgggaacgggccggtccctttgcctcgatgaaccagacccaggcacggattcgagacacaccacgcacacgatcacaggcggccctcaagcgttcaggggaggagggcaagatggaaaagaaggagagcccattgtacagagctttgaagatgcagacaacgttgacagctgtgccttatggtcgacgttccgctataaaagctcgacttgccgacatcactagtttcgaccacttccctctccttcccgcagttcgacagtcaatattcggccaggctctggccggtctaactgatgttacccccacacccattcaaagactcgcgattcccgaattgttactagatgaatccaagaagaagaagaaagtgaacaaggcgaatgaagatgaagaagaatacaattttgaccagtatctcctggcagcagagaccggttcgggaaagactctcgcatacttgcttccaattgttgatgctatcaagcgtgctgaagtcctcgatatagaggaggagaaagtcctcgaggaacaaaaggcgcgagagcgggaggagagaatgaagaacaaggcgttcgatctggatcccgaggagccgccaatgacaaacgccgctcgtcctcgggctatcatcctcgttcctacctccgaattggtatctcaagttggatcgcagctcaaagagttggcccatactgtcaagtaccgctctggcgaaatctcatcaactttcactccccgccggatcaagaacaccctattccaccccgccggcatcgatattctagtttcaactcctcaccttttgagctctgttgcgagatcgaatcccaatatcctcagccgagtcactcaccttgtactcgacgaggccgactccttaatggaccgctcgttcatcccgacaacgtccgaaatcattgccaaggttgctccgtcactcaaaaagttgattctctgctccgccaccatcccccgcagtctcgacaaccagctgcgcaagcgcttccctgatctgcaacgcctgacgaccccgaacctacatgccattcctcgtcgcgtacagctaggtgtcgttgacattgagaaggagccataccgcggaaatcgaaaccttgcctgtgctgatgtcatctggtcaatcggcaaggcaggagatagacacgaacacaccgagacatggggaccgctcaatgcgtacatggagccgaaggttaagaagattatcgtgttcgtcaacgaacgtgaggaagccgatgaggtcgctagtttcctgcaatccaagggcatcgatgctgtctcgctatctcgcgacaccgattcccggaagcaacaagagaccctctcgcagttcacagaggttaagcttccaccgactgcggaggagatcatgattaataagaagaagaaccgcgccgccggaagcattcccttcgaacttcctgagcgccaagagcccattcgccgccttcccgacacaaaggttcttgtcactaccgatatcgcctcccgtggtattgataccctggcagtgaagacagtaattctctaccatgtgccgcacactaccatcgactttatccaccgactaggccgtctcggtcgtatgggcaagcgtggtcgtggtgttgtcctggtgggcaagaaggaccgtaaggacgttgtccgtgaggttcgcgagggcatgttccgtggccaggctttgatctagatccagatccagactcacgcgtgcgtgcatttatcacattgtataaatcttgtaacatacatggcgttgatttgaggttttgattttttggggaattggaaaacgactatacccattgtcgcgatagtcattggatctttgaaagtatgtacgatatgcaatcatatatgatgaacctaattctcctcttatataacgacgtctgagtccaattgcattgaaacaactgtaaacgaatattttcattataacctcacacgggtatttcccgcgccacccttcgccagaagtcacatctcttcttcaactggatcagcttcacgttctcaagcctatcacccacaacgacgaattcctcgtctgtatgtagttctggcacacctggctgcgaagcgttcgtcaccttgtgtgcattcgggtctcccgtctggaaaaaactcgcgaaagcccccgcgtagccttcataaacgacagggttagtctcttgaacagtgttgattttgttccactggtatcaatcaagtcaatctatgccatcgacactaggaaagcctccagaaaaagagagcgcaacgataaaaaggacgaacatacataaatagtatcactcccatgggttgctggggaaatcgtatattccccaagataccctttctccgtcgcagccgacgcaatccaataagctggacaagcaagcacaacgtcccgataaaccaaaccagcccgaatataagtattattataactgtcaatcgtctcggtactcccttcagcgggataatatatagatttcacctcatcaatctgcttagccgacaacccaggcacgaaactggaaatccaccggtgaaagctgctgacagaggaatcaaacccatcgaataaaacggcgctgtcaagacccggaggaacgaagttctcaccctcgtggctgttgtacattccccagacaaactctgtgttcagggagcccatgctcacagtttctgtgagtgtctcgacaaggaaggtcccgtctataacaggcgcccaggtgtaagaactcgttgtccaagtgttgctcgctccgatgatcaggcttgcgtcacggattttctggatgtcaacagatttgagacaggcgagtatctcatcagcgtggttgtagctggcacagcctgttagattcgccagctgggtgtagattgcttctgcctcgggtgcattgaatttataggtctttggccagaacggcgagctagcaagggcttttgagaatagtttcggttggccatggcggccgtttgcgaggacttgcgccactaccgagccggcaccggctgactggccccatattgtcacgttgtgagggttgccgccgaaatggccgatgtacctccggacccatttcaagacatattgctggtctaataggcccgggtttagatctgaggtcgacgagtctttgattgccttgccgggtagaaacccgaaggcattgacgcgatagttggagtagataacgatgtagtcgttaatattgctgacattgaggatcgggaatgaggatggtggcatggtgaatgccgcgctgccttgaatgaaagcaccgccgtaaaatacaaccagcactggtctgctaatatctttggctagatcccatggccgtgagaatagtcccaggtagagacagtcttcggtgccgttaaccgtccgctgggggcacatgtcgaagtcctggtctgtatcatataggtctccggtgatctttagcggtggctgaggcgcacgaaagcggttctcccctgttggtggtgcagcaaatgggattttgcgaaaataggagaggttgtaggtactgtcatattgacccttgaaggatccgtagtcgagggaaactagagggttgtcccatgcagtgctgactgtgaccacgaggccgaggagaagcgtgacaacctcattggagaacctcatcttcggttagagcggttttcgttctagagttattgttctattcatctgccatctactgcgtttagcctgggggccatatatagccttcccgagccatcgcatttgataagaggaatcactttcggcagaggaaaccccgagcttctttgtggctctcgagcaattcggtcgacactctcgggcttggctgcgagagagcagctcattggtgcagttattgttgatgcccggaatgaaatgtggggatttgtgcagtcgttgtcaattcggactcgatcaccccggtagtgagaagaaaaccgtagttagctaacaaatcccgaggacacctaactagttatatttatattcaacaccaggtccacaattagtgtgtcaaaacgcagctgtcaagggagtccccggggaataaagcccaagtaaacattgccccctccagaatccaaccctgaaaatgcatcattgcaagaaatcaaaactccagatccaatttccatgcaatataatgccaattaaaccaagtattatcacaaatgcccattcttctaaaccaaaactccgtcctcgcccgtcttgcctcgtaaattgcacaggggctccaaggctgtacagttaaaacgccatacgaagttctctagtacgacgccgacttgcccgagcatcgcggtgagactcagttgaatcactgatttccctttctggggtgtttgtgtcagacagctcgggggtgggggtaatcccaaaactcacgccgcggtctcggcgacagatacgtgattgtgcgtcgggggacaaaaaacgatggacagtgcggtgatccattactcgatcctcaccatccgggcttttgtccgttgatggccactggtatccgtagagcttggaatgacgttcgcagcgcggacattcacgtcgcgtgaggtatgagtttgactggaggaaccatgtatcacaggtctggcactccacccagcggtcgtacttctgggcaagcaatcgtgatgtcttggtatagtccccagggactcgagcaacctgtgactcggtctcgacggagtccatgatgaatcgccgcttggtgcgaggctttcgctttttaggcttattcacaatggtgccgtgggcgtcatctaatttggtggaatttgataagtctgacaatccttcttcggggtcaatgtccatggagtgggtggtgacgggctgaccttcaggagagacatcgggatgatcctcactgttgagcgctttcgactcagacggttctaatatagtttcttctgtcttgatcttggttcctatgtcgtcctcagttgtagctgacgtcgacgagcggtgaggttgatcggctgtggagtttggagattcgcagtctgtggggatagtagaattagtgctattcgtcccgtttcgatcggcttgggcagccacgcttggttcccctgtgacaaccgaaatgaagggttgtgaattagttggcgatgtcattgcggttcgctctatgatctctttcttcggctcggacacctgggctacagcttccgtcagaagagtagctggaatcagtacagtgtccgggatagggatgtcatctgatccgggcgttggttccgcagtaagttcggaaactgagatcccttctcgcaacttagaaacttgtcgttggaattttgcacgtttgcgcggggtggaagaagccaaggtagaggagctgtcggattcctccacatccgagctgcgtccacgcttcctgctcgcattgctgtcttcactcggtgtatcttcagacacggggctggcctctttgctgtttgtctccgtatcaacatgtgaagaccagccattccgtacagcgatttcgcaagtatgacataggcactcgcagttgtcaacgccaaagtaatcctctccgtaggaaactgtgatctcttccccctcgtgaatgtcgcgcatggctacgacagacatgccctcattgccccttgttgtcaagctgccgttggcatcacagtcatgattggcaaaacgagcaggacccaaaaagaacgacggagctttacggcgactcgacatcacgatgctgaagtctttgcgggtcaagccgagatccaactcttcttcatgggtcatagacacaagcgttccgctcaggtgtttgatctcctcgccctttttaataaacctgcgagcgcagatcgctgcttcatgttgcgtgataatgtatcgattggtcgtagtgacctcgaacggacagtctggaagatacatctgaatatacttgcggaggtgtcggcggaaccactccttctctcgagggctacggaggtttgccacatatttctttaagcccgagatttccaacaacttgcgttcggccgtcgggatgtccttgtcaacaatgacattgtggagaagaatgcgcccaatatcgtcatcgtggattccgcgggcagggctgtatttcgtgcggttcttgcgggtagtggtccagaaataagcctgccagtagcaagtattagtggacagatatctatgttgaattgtaggcaaataacatacgtgatccactagcgcatccgttgcgacatcgtcatagctggccagcttagccaaggtcaagcgctcgcgacgttcagcggcgggcgagccccttcgcgctctctttggaggcatcatggacgtaagaagaagccgaagaccgctaattatgaaagcgggagagaagaggtcggctcatagaatgcagagcggctgcaaaggtaattgggggaacagtggagggcagaggtccgagggatggggtcgaaaaaaggttcgaagcgcaagaaagtaattaaaatgagtgactgacaatcaacaaaacgaacattatcaagtgattgtcaccattgaggctgttccaaggagaaaggactccctcgcggatgttttttaggggtggaacgggagtgccagctgagacttgccgttctctcgacttttactcttccgccttcccccttgacgtgtcgctttttttttttctctgcggtaattggatatgaagtaattgatcaatggagtatttcagtacgggggttgtttcgacttgattttacgcgctcagctcgcatacaacaggatgatccaatccttgcccctgcggtatcatcacaattgcacccaaaataatcttccagatcaagtgatcattgtttttcagtcttgttcatagaatgtattgtatattatccttcgatgggtattgactgtataataccagccaatctgctgaagaattcaatggatccaactatgaacatgggatgctctctttcgtgggctttttaaggaataacccgatggcttctcgagcttaggtttttctctgtgtccctcggagtatataaaagtcaaccttcaaagaagacaaaacaaggactataaagatctgaatgcgggatgttgctgaactataaaagtagttggttgatgtcgtatggattgaattaagaaaatcccacgtagggtgttgcttgaagtcagaatagatactccatatgattactatactaaacagctcagggtacttatgttatgaacaagcggcgcttcttgtgcttgcttacgacattaggacatacccatggctgatatatattggagaatcaaacgacagccttttatgagcacaagctcaaattagtctgatatttgcaaaaaatgaatagttgcgcgattccattctaattccattcccaggaaatccaactcgaagtcctaataaccaactactccgtagtatattgtataaaagcccggataaacctactccccggcgaaacctccctccggcccgcgagaacaaattgcggacaagcacttatctccagaccgagtaccaaaacacaatgattcaattaaaggtacgcatgcgatgctccttagtggctcaaacgatactaacaccagctccgccagacactattaagttgcatcgacaattccggcgcctcgatcgtcgagtgcgtgaacgtcctgaagaagaagcggcccgcgacaatcggtcagtctccatggcactcagatctagcaacacagcaagaagggatctgggaattaaagctgacattgtgattggttatctaggtgaccggatagtcgtcgtcgttcagaagcagcgatctgcaggctccgaagccaccaccgctgccgcgctcgccaataaggtccgccgaggtgatattcgtcatgccgttgttgttcgcgtgaagaaggaattgcagcggcctgatgggtcccttgtccggtttggtgataatgcttgtgtactggtcaacaagtccggagatcccattgggacgagactgaacggtaagtgcccatcggggagtctcaagataacggctgtctccaggttttcgatactgatatctctacaggtgtggtgggacaagagctacggaagaagcagtggtccaagatcttgtcattggcgccgatccatgtttagtattttcaagtttctacatttgttggaaagcgctctttgtttctttgattgtacttcaatctgtatgtattcctagttgatggcatcagtttcaccccctgttcctaaatatccacgaattttcatcctgttcctgctccaaaatgttcgccgaactcctatgatatcgccaaaaaaaaaacgacaaaaacaaaatctcaagggtatctcggaaatggagactgcattacagaaatgcaaagatcacatgtagacttgtccgcacgcacaacatacgtagtagagtttctgagtagatagaagcaggagtcagcgcatggtttatatcagagggtcagggatccatcaaaggataacttctcaccattcccgtttcggcggatcgttgttgtgactggaaaaagacggcttcggtttcgccacagcttgggcagagcttgttggcccgtggaagctgcaaatcccagggtgttagcgtatggatgctcaaaaaaaggtacagagctggggtagatgcccgaggcttgatttcagagggctccaggctgtcacccacaggcggtgcatcctcaaggagatcctcgtccggggcggaaccgcagatcgaacaagcataatatcaccgcatagggtaaaaaaaccaggaggacgaaccgtggggtcagatgtcacgtcctgggtgacaccggcagtgtcaccgacttggctatggagatggttttggtagacacagtgcgaggaggcaggctcgccgacatggcaggtacggcacgtgaacatcaatcggttgttgacgcgatcttccttggggtagagcaggttggagctgttgaaaagtcagtaagatgtcctcgaatgtgtaaaggttcccatagaaatgactttgagttgaggacttgtggataggcttaccattcacggcagaacttgaaatggattcgatccgacggcttagtctcgccaccagccgtggaagaagggctggcagacatgctgcgcaggtggatcgcaaaatgctagacgtgctgtattgagggtcgagacgcagagtggtcttagatgtgggaatgaggaaaggaagaaatgaaatcacgtggaaatcacgtgttttgtggatggtgaggtgtgaattcgcctgccccgtagttaactaactactccgtaactaatacagagtactccgtagctaattccgtgtatatgactcacctcaacctagcgcattgtcggccttccaaggttggaataaaagagtcaacaatgaacctaccaattacatcgctttgtctattaacaggcccaggcatgacaggattgatatcgaattacgtataaataagcaatatactgacgtacaggtattaggacctacattgtagctcgtctttattattgcgagctcccctataactacgtaatgtattattgatgtagatagttgtcatagatggtgatcggtcaaactgggaagcgggagagctaaagcttggacatgtttgtgtggtttgcaactgttcaccccgcagtttccgttcacttataactgactatatcgttttatcgtttacactaaatccgttggagtgttattgatctgtacattattatttactcagaaaattatcagaatcttttagatccgattgcaaaatggtaggatcagttcatccctttgaaagtttgcatagctgactcttcgacctaggccgacacaggtcttcctaccggttgggaagttcgccattccaactctaagaatctcccatactacttcaacccttccacaaaagagtctcgctgggaaccacctgcggaaactgataccgataagctgaaagtctatatggcgcaaaaccacaccccggctgctcgctctgatccctctggcgagggtgagggcaagatccgctgcagccatttgctcgtcaagcatcgcgatagccgccgtcccagcagctggagggaggctgatattactcgcacaaaggaggaggcgattgaaattcttaagggtcacgagcagcgcattcagtctggagaaatcactcttggtgacctggcagtcgctgagtccgactgcagcagtgcccggaagaagggtgatttgtgagtttcttaattgacctatgtgcaggtgtcttgctaactccttaaaggggtttctttggccgcggcgagatgcagaaggagtttgaagatgccgcttttggcctacagcctggcgaagtcagcagcatcattgagacagcatccggggttcaccttattgaacggtaggttcacccacgggagtgaagtgaaaatggctaataaaggttctcggtctccagtgtccaataatcgcatgctcccgcctatgtcttggtcaattccatagcgaaaattccgatcgcatcaatgcgttgcaaaccctggtctcacttggaataatcttcataagaaataaaagtacaatgaatgaaatgccatctttgttctcttctgacttatgagtgtcttgtgtcctgtctcgggtaggaccaatcaagtagcagaacccgcgacagccttttattccagaaagatgccaatgtatcgttttgaagatgatgtctccaaatgcccagaatttgtgaaagaagatctgtatcacaacagggctatgaagtttgtcgtttctttggatccaagaaacagagtgaaactcgaaaatgtgcctgatatcatacctaatccctaagtctaaagtagactctgccttaggctaacaatggcacttttaggcttagtagctatgatcaacggaaggttccatggttggaaagggaagttgagaattaaaataagctgtataccgtcgatgtcagaataagatgtcaaaggtcattgagcgcaagcaaaacactgctcttacagacgagacatctcccagtttcatctacttttcttccaccatatttcctgtcactctttccttcttccttctcacccacaatctctctttaccacttccccccaacaatcttttctcatacagccaccaactatgagcaaccccactctcaaactccgccagaagcggtccatgatgcgccttcttaatgaaggccgctcgattctcgagtataagttcgacccaagcgccttcgtcgtcccccggtggattttagtgccccacgaggtgcgcaatgccatggtcgccctccagtacaaagctatggtagccgtatatggcatgaagagcctcatggtcacccgcgaccaccgttacttcaagttatgccccaaaagcacaggccccattatctaccagctccatcaatcctccatgcatcgtctcctggaatggaaggaggattggagtttcgccaacccgacccttgcagccgctgccaaaatccctcgtgatgtcctgcagttctgcgttgactcaatcgcctacggaaagtttacctgtgattacaccaacaagattgacggttttatgtctggtgctttccagagttggcgccagcttcgcatagagattgggcatctggccttccgtctcatgagccataaaccgcacgagtacaataagtggcttgtctggtgggagggcaagtttgctgatgacatgtggagatgggaggtttgcctcgagggcttgattctgcccacctgggaggagatcatcgatgatgtctacctcatgatcaacgatcgagttgagaatgcccaggatctggccaacacattctacgtcagcaccccgggactcgcttcgaccgggctctgatcacctgggctttgactttctgcaatgatgattaatgaatatctcaacaattacgacaaatattggtctgggtcggcgctagtatggagcggcctgctgtgaatgagggcactagaaataaccgggagttttgatttgattttttttccttcttgaaatacaacaaactacagaaaatgtatcctacgatggattgtgacaactaagggcaaatgcaccatggtggacttggctctgcaacacacttctttcctgactttctgttacttgagattattacaagaagctactcaaataataagcacccaattatctgatataattgctcaatgaaagaaagtaaaacatttgatttgcctgtcaatggtcacgtgtgcgttcgaaccctatcaatagtagcagccctatgggggaacaaagtaagtaggtgccttgttattgttcgttttctgcaaaagcaataagacaaataaactagacaagggaaggccaaccaaaaagaagataaacccggagtcgaaccggaacagtccaggtagtggatcttcggcacttccctcgaagtgcacatgcaaatcatgttaccagtaactgttgagtcctcagtctgagctttatattccctttctctctcaattttcaaagtttatttgtgtacacacagcactggctaaagaaacccttggaaggaaaggacagagagagcgaccaagtccaagcccacagaaacacatggtctttgtgcaatttgtgatggtactgattcttttctttcttgtgaagagtacctcgatgaaggaattcccgacaaggaagatttcagttccggaaacgaagaaggatgatctattgtgggcctctcctttaggtctaaacgcctgaccaaaagctcggaggaccgatcattgctgttttatggcttagtgcaggagaggagcactacccaacaggacaatacgagatatatgaggggcggaccggaagatattgtcaaacatgttattatgttatagactgggccagtttctaagaagtattttgttctagtgaaattcacttattatttaggggtcattccagcgaacagcgtcacattattgcgtagatgggaacaggatgaagtggtgttgacccatgaaaaagagcagccgcctgaggatatctaaatcaaccaggaggaatggagatataggccacaattgagatgttgtaacctttaacggcttagatctagctgaggacaacctgaggttcagggtttaaaattcgaacagtggctcgtctcacgagccttgtgaattaatgcgtaataacatactccgtcaatgtgaaaaactacatcccccgacaacatgcagagtagacagctcacagactcgtgttcaatcgttccaaacgtgaggtaatcgcgtcaataacagcggatcttgaagaacgttagtcattgattcattaataggagaataagagaggcaactcactctcgttcgaccatcctcatcgcatctgcaaccttagcccgttgcagtcgttggggcaccttaggcgggcccccaggagaggacggggttccaagttccggagagggcaatttgcccgcgacagacttggtctgggccataagatccagagcaagtcgtttaacctagatgaaatgtgagttttgctatggcgaatgcaagaaagataaaacttacagtctccaaccgcgagatcaatggctgatcctcctcttgctcttcgccttgctgtaaggatgcagacaatgtcttcacctcaattatccatgccttctccctctcactcagaggacgacctccagaatttaggaccttcgtgcgtagtgcctcatatcgtcggttcagttcactttgcttgttctgggcggcttgcaatcttttatccagcgcttctccatttcgtactccctccttgcgatgcccatcttccccaatctcactcgtgacacccttgacacgctctgcaacgtctgcaagctgcttcaattggtcctgcatctcgccctgcagccgctcacagcggcggaataaatccgaagcagctcgctcaagagcattggtatgagcagatagcacgcgatgcgcagtggccacaagatccaatgtcgcaggagacaggcgaacttgctccttgagcgtatggcgttgccgatgcgggacatgcttctcgacgaaagaatccagcggagagttggcatagaaaatggcgggaacctgatacggggcccggctcggcgacaaaagaagcgagcctggcgctgaggctctgggctcatacagtgatttgtctagtgccaaggagagagaatcttctggtgtatccattacaactgcataagggttagatggatggtaggtgaggagcaagtagccaatgtcaaagtcatagaaaacaagagacgtggcaagatgttcgttttgcgcggtaatatcggcattcgaaacctgcaaaattctctctcggttggtcacattcccgtcacatagaacctggagacggaaagcggaacctgcagtgtcttcagcttgcaactcagcctccagtctctgtacccaaccggagagagatataaacaccacgttggtggcagtggtgacaaagaatgagtatcgagaatggatatccttggtgaaagtaggccatgaggttgtttcctccccatccttgatcgtatctagtgattcgaccaggaccaattcagtcggctctgaaacaggagtttggaacgcgttctttctagctttaggtagccattgtccttcaacgccatcgagctctagacagatgtgaactcggccattcccactagtaagagagagaactgttgccgaaagcttatcttggtccccagtttccacggctaattcttcttcctcgcccatcatgagatcctcgacgtttagactggcggcaataacaagaagatcacaaagatccaaatcatcgagctcatcgccagtttcgaagcggaaaggcccttgtaatcttggaatagcgctaggattggccgggcgcgtgaacacatctgcgccttgaattgttcgtgatccagaaggcgcatccagaggttcttgttcatcaagctcagaaagccagtcatactgttgccggcaggcaatcagttcctcctccgattcctgggattcctgttctaaagcaccgagtttcggaataatcgctgcagagagggaagggatggtcgtagaaggggcttgccacttaaaaggcaacagaggacaaagcgcatagagatcaccgggtctcatggctacccacagggtcataggcgcccacgcatcttctttctcattcccattgccagcgaaacaggccgacgcaacctccatatcaataacatcagcggagaatcccttgcttttgccaaatccagaaggcgcgaagtcctggtcgcacgaggtcccatcgacaagtttcttcagatcgattgctagagtcggctggtcgaaggaccagtggttattccggtccaactcccagacacgtactgcagcgtcagccgtgacagtaacaatgcagcctcctaaattggtgtgcaaccccagtggatgccatagcgcagagaccaccggagcctcaggaataacatgggttgtcggtcctaactgatatgtcttcagccggatagagtcggagtcggaggacgaaaggtgtgaagaatcgggaagaacggagatatgaacggtgtgttcagtgactatggcaaggaaggcgccattcggagaggggatgatctgtttgatctgtccatacacgggcactgctaagacctgcggaactgttagtcgcattcaatttaagtcggattttgggtggaatagctttgcataccctgtagggaggaacctggctgaggtcaatttgctcttcagcttgactagcatatccctttttctgcttaatctcttgttgccattggtctttgagtcgggcaaggtttgaccaccgtatttcattgtcaacaacagcgaacacctcattgcctctcttggcgatcgttcgtgtagctccatttctcatgggcttggatccagtttgcaggtcctcccctgggctctgggctgaactgctagacaggaactttgcgccaggtgagggccggcacagccaggcaggcgcataactgttgaccttcggcattaaggacgattcgtgaaataaattgtataatcggagggtgttgacagtttcagatcatcctggggcggtcggaaatagcagacgagtagcgtatgtgggaaaaaaaacaaagttgacgaaagcaaagttgttgatgcggagtggaattcttgggtgccaagatctttcgaagagctccgagctgctttgcttccccaactacctgccgtcaaccacacactccaagttcaacctttatctcaattcactatgagtttgctggctgtaaacacggtcgaccgactggatcgaccaagcgcctactacgtcagcaaggtgagtactcgccctggactgactgccctttaccaagctgtgtcgaaaccagtccaaataggctatagaggctgaacaaactgtccacagaacaagcgacgcagatacaatgatcgtgaggaggaggaaccgcagcaacaggagaaacccgatgacaaattgaaaaatgcgacaaccctctacgtgggaaatctgtatgcaagcatgcaataacttagacgcaattgtcttactaaccaacccaagttcgttttataccaccgaggaacagattcatgaactcttcgccaagtgagaatgcgctttcgagtctcttcgaattatgattaacctcgaattctaggtgcggcgagatcaagcgacttgtaatgggcctcgaccgattcaacaaaacaccctgcggcttttgctttgtcgagtattatacccatcaggatgcgctagattgcttgaagtacatcggaggaaccaagctggacgagcggatcattcggacagaccttgaccctggatttgaagaaggacggcaatttgggtatgtggtcttcaccaatggcggctttaagctcgtacttactgactttcgctgcagacgaggcaaatcgggcggtcaagtgcgcgatgaataccgcgaagaatacgatccgggccgtggtggatatggccgcgcctatgatgagcagcgccagcgcgaggaggacgaatacggtgctggaagataggtcgggacataatggaaaaggactggcttggcaaagcaatggcgttacttcatggaagggtgaatccaattagcagaaagaggaaatgtctattcaccgaataccctatttacaactgtcttttttccaccttctaatgctggtgaattattgctttaacttgtctcgtttcagcactgctgcttgaacttcgcgcaaccaccaagtgtggattcttgcgtcacctgtcagctccgggtgaaagctggtgccgaatacattgccctgtcgcactgcaacaatgtcgccacttccccggtctgaattgatatctccaccccccgtggcgggttgagctgccggtctcactaatgttgctagtacctcaacgtgctctgctgttgctgcttgcgccactgagtcccgtgcttctctggacggtgccacgacaacatcttcctgttgaatctcttctttttggatgccctcatgatggggaagaatcttttcgacgataggggctcgaatgaatactgctgggaagggaggcgcgtcctgacccaagaatggcagatccaacaggccttggaagctttctgtctgtcgaccgaagtggtttcggttcactcgcacatcaagaccaccgatcagctcttgccctcctttttttgtcttgttggcagactcggcgagcaaaatgagcccggcgcatgtaccccaagttggtttgcgatccactctacacatacccaacgtattagattgaattcatatgaactaatcaaattcacttactttacaaattcccgcaatggctcgaggagatttgaccttgctgcgaccaaagacatggtggtactctcgcctccgggcaagaccaggccatcgcatgttgccagttcttgtggcgttcgtacttcgatgaagtgccattccgacggcgtcacttgctcagcggcttttttcaaaagctgcacatgctcaaaaaaagcgccctgcagggccagaactccaacagtgatagccattgtctcgaaagataagaatcgaagacctcgaattcttgatattgatgactcgtttggagcacgtgcctttaacttcccggcggggagcttatctccacgtgatatctctgtggcgcatgtcgggatactctcggactttactccaaagtttttggctgggaagttgactggataaccccagtcatgatagtatagaaatcaaatttacctacagaaagactgatcaggtagccctacctggtatatcacactagttccaatgatttttttcctctcttaggtacgccgttgtattatcggcacgtgttgatagataagaactctgataaggcgcttctatttaggtgggatgctgcatcctaggctggtacgagtatacgagaccccatgataacaatgcaatggtagacctcggtgtatctggacgtgtaagtagctactggcccttcaggaattacccactgataaagtgcagaccaaagcggattccaatgagattaaacagaacgacatcttaaagggccagcccacgttggtccgatggtacatcgatgtcagacgttgggatgaaaaatcctttgaccttccttttctccaaactctgaatgagcctgatcaggtagctgtcaagaagtactaccaaacttcggacaaacgcctgtccttggcctcccagctactgaaatattactatgttcaccaagccactggcactccctggagcaaggttacgattcagcgtactcctattcccgaaaatcgtccattctacgactcaagtcttgatttcaacgtcagccaccaggctggtctcactttgttcgcaggcacgcgtgccgcaacagcccactccttaaccggcgaaccacaaggcttgcctcgcgtgggaattgacattgcctgtgttgacgaaccctctcgccgtcgtgctaatcgtccaccgaagactcttgccgacctggcaactttcgtggatgtcttcagtgatgttctctcactccgtgagcttgcgaccatcaagaacccgtacgcgactcttaaattggctcgtgagcttggtctgagtaaaattgacccgagaaaagacaacgaggaagtccatgctgcctacggcattcggctgttctactcaatttgggctctcaaggaggcttacttgaaaatgaccggggacggccttctggcctcttggataaaggatctggaattcacaaatgtcattcccccagaacccgtacagaaacttggatttccaggtcgccctctcactcctacaactctcaatgcgccctcagtcgaaaattggggccggccttactccgatgtcaaaatatccttacgtggcattcctgaccattctgtgcgagttcagctcgtcggcttcgagtccgactacatcgtcgctatagccgcttcaggccccaatattggagccatttcgcagcagatggccgtgaatggcagcgatcatcacctacctgggtatatcacagccctcgaccctgaaattgaacatcagaacgtccgaattccccccaatgcgcttcgcacagtcggcgaccgggacccctggtgcgttggctcggcgattgtagacccctggttgcccatgcaggaggttgatattgacattgatattcggccctgtgccgagggccgctgcgagcatctacggaacccaccgagcttctaagtcccttcttcctgggatatgaaccagtaatcatccctgagttacctgcatgttgcatctcctcatctcatactcctttctgagcgagatttcgcgatgattccccttgagcatatttctgcattgctttgttgtgattagcgaaaatcaaatattcctcccatctttagggacttttgtttcaagtgtaatctgttcttagctagtcgagtgccgcttagatgtttatccctaataagcctctgtgaattttcactctccgatgtgatttagatcgaacccaaagtcaatattcgaagacgaagtatatgttgcacgaaaaaagacgagtaagaagcccaagcctatctatgttctgtggtctaatgtaaaatcaaatatataagtaacaaaagcgagtatctaacagtagccgggtcgtgtcatgcgtttacgctaaggatatatacattttgaattgaaaaggggggagaggcgaatcaagagagaagatgatgttagaaggcaatgccgatatctagatcattgttgttctcatgagcagtgtcgggtagtgtcggataggttccacgtctgaggccctcaaattctgtttgttgggtcgaactggagtaggtaccgaagaattgggcaggattatactgtagtgtatgaagggcggatttcttcttcgttaattgtggactctgcgtttgctctctgctgttgtgaactttgaattttgcactcaaaccaggagagacagatggcaaatgccgagcacggagctatgtgacgaatcacaattttgtttgccacttagatttcaatggcgctggagacgccgttggtgcgagaaacatcgacttcgttcttctgtacatgagacatttcttcaagagttttgagcattgaatcccgcgtcgactgggtcaagctatcgacatcgctcgatgtcaaatcctgagtcaaaatgggaggtaaaactgttccaaaattgttagccatgttctatatgacatatattggcaacttttaataacacccacccttaattttgatagtcccagcgttgaatcgccaggcacgaggcgacagaacgtgcgaatagttctctgtcacaatcggcacaattggcgcaccggccttgacagcgaggtggaaagcacctttcttaaaaggtaggagagtaggctcgtcggagtaactccgggtgccctcagcgaaaatgaaaacgctctggcggtgattgcgcatctcggcggcggcaccatcgaaagccttgagggctgtctcccggttggcacggtcaatgaacacagtccgggacagagacatgaaccagcccaggaaaggaatattccgcagtgacttcttggcagtcacactgcagtatggcgggaagacactgccaagcatcaacacgtcaagctcagtctggtggttaccaatgaaaacggccggacgtgtggagaggtattcttcgccttcgacaacctcgaacttaacgccagttgtgaaccgcatcagccacttaaagctacggcctgctgcccactgcgaaacacggccgtatccaactagccgcagacagatcgagacgagcacaccgtacgcggcactgacgaggagacagccatacgaggcgagacaccgggcgacaaaagcggcgcgaggcactttttgaccgagtgcaaagagggagacggtcactaccacgaaagaggtaacacctgaaacaatataagatccgaaagacatgttgacggttgttgggcgatcaagaagagctaggtaaatgcggttagagggtgaaaattatacttcatgagaggggacgtaccttgttcactagtatatggacaacagccagcccacgacttgaatacgaggatggaatcagcgaagaaaagaggaataacagatcaaatccaagattgagccatgcatggcttgtggagaagggcaaatggtagagagttgaatcgtttttctgccccgatgccgactcaccgcctggtatgtgtatatgacggtgtcaccagggcacttgcgggggtatttacaccagaatcaaagtatattttaaggattcagccaataatgagaatctctatcctcaaaaaataatagaattatgcattcaccatcctcatgatgcatgcccagggaaaaccgtgaaactaatgtacagaacaccatcatatgccagatgtctaaacctggaaaagaaaactccacagtgatgccgtgcaaagaggccctcaaacgccgagttcataagagagggcccccgtgggaacccaatagaaagacctgagacattacgtctacgctatgtcctcatcctccatatcgtcgtcgtctaacgactccattgcatccttgatgtattgtgcagcctgtgtgagatcataatcagaaagaacttaaaaaagagaggggaatctaaaaaaaaatactctaagacgtacctttgggtccaagttcaaggctgccgtgaaatgcttgatagcattggccttgtcgtggagcattttgtacagctttccaagaaggtagtgcacgtttgcctcgtccggcgccatgtccttgaggacctttaattctgccaaagcaaacttgtactcgcgcagcttcataagtacgcgcgccttgcggaacttggctaataccgagttgggggctagcgaggaggctcgtccgtagtggaccagggcatcttggggattgttcattttctccagtaccagaccaatgcagcaaatgagcaccgcgtttgtcgggttgatgctggctgcattgcggaagtgctgctcagcgaagtcaagcttgcccatcttgtcatacaccgttcccagtccgtaccaagcattgtaatgtcgattgtccgcgttgatgccgtggcgataggcctccaatgccttgtcgtattcttcgttggcgacatattcatgtccctgtagcgtgaaagcatatgcaaattcaggatcgagcatagtcgcacgcttgaagcacttgagtgcttgatcatgatcccgttggtgagaaaaagagttgccaatagcacaccacgcctgaggggataggcgatcagcttcgagtagctgatgcgccaagtaagccagttctacatcacttttcagatgccataagacggtcgagtagatctccatatcctcgatgcgggagggcgctaatttttgaaccctagaaaagtacttcgcggcttctgtgtagcttgcttgttcgaaataggtccgtccaagttgagacaaaacccaaggtgtttcgcgctggccttgcgagagagaattgaaagagctgatggcatccgcgcacctgtaacggctcaatgagaaatatccagacgcaagtttattgaaaagacccaaaagccaatccaaggcttcaagctctttagttttttcggcatttttgggtaatggggggacgagatgatgcgattgagacaagccagtccgattatctttaccatcattgtcgggtgtctcaatgggttttcgattgccactcacgacacggccgacagtgggcacacctcctactcgtccttttgtagggcctcctctcaacttcttcatctcgcgaccgtctctgccagtaagcgtgctgtttgaaagcttgctgcttgtaggtttgatctggttgaagaggcgaacgcttcggcgctggggagcacctggttcactcggttgtgatgagggaagtggatgggccacttgcccagagactgtgcgcttgcggtccccgaatctcgatacaagagaggaatctcgttctaccggagcagctggctgagtctctggttcggtccgcgtcttgtggcgaggtctgattcccgttggacgcattcgcggcggaggttgcccggtatggtcaaggctcatagtttggattgtccgtgtctttcgggcaggggccaagggtgcttcccatccagcttctgggtctgtgacgccattcgcaatgcggaagtcatcagagccactgctctgtgcgcctggggtctccattccgtcgtggaaaaccggctgtgccatagcagcaaaattaacagagctcccatttaacttttcccaaagagcagagcttccaaatgtggtgtcagtttcgccacgggaggcagagaccataaaagggtcggattcagggttatttggaggctgcattgggaaattcccttcttcgtaagccacgtggtcctgcacagtagttatttcctccggcgatgaagatattattgcaagaagttctgggctaagttgaaagatattcgggacacgaatattgacacctgatattgcattagaaaaaatcgccttgagagaagaagttaaatcaatacctgtttcgcaaagccctaggaaagcatcccacatgaaggggttcagtttcagtgcctccacgtaacagtcaactgcttttgtcaaatctttatgtgcgtgccaaagtttcccttgcaaagaatacacagctgcagcatcaggcaggtgctgtcgctgagtctcactatgcttgtctacaatgtggttagcaagtgagcttggaattgaaggaaaagtttgctggcacttactccagtggttcttagtgacccagaggggtttgctacgctccagagccgtaacaccatccaagtatttccccaagtctaagcaggtctgagcaaagacatatgcacaaccagcatgcagaccacgtgagcccgaaggctggctgcattcgaacgccgccttcacttctccattgtgtaggtggcaaagggcgagcagatattgggcctcaaatgatcgtggttcatatgcgaggaggcgtgaagcgaggaagagcgcattgcggattaggttattgtcgagctggtaatagatgaggtgccttagctggctggcaacatgcccggtggacaaggccatagtgaggggtcagcaacacggtatgcgatagcacaaggcaaggcggaaattctttagtgattattggaagtggagataataatgcgatgcgcagagtcagttccttagcgttactgtagcatcaatgtccgacgcctttgtaatgtcctccaagacgcggggaggaaacaaagacgcgatcgagtgggttgttgcagcacgagcgaatggtcccatcaacagccacgagacatggacagcagcaagtccgatgtcttggtttgaattcgtctagatgcaggagctatcgagtgttctcggtgtggaacaatgaggaatgtaaacccaagccggaaatggtaagcggatgaagaatagaaagaagtgaagagtgagtcctctggttacgtcatctgcggacgcaggatgagtctctcagagtgccaggaacatttccaaataagcggaggactgcaagatgtgctcaaataggattcgttctttctgttattctggtctgaggcggcctttgtcatttctgccgttcttgtcgggcggtgggggtagtggagggcaacaatcacccaatgtgctatagctgtcatatgcaggtcccctctcttcttcttccttctccgcccagtctcgaattccgatcatctgcttgccacttgagaggggaaaagcctggtcaattcatctagggcatctgttctagaaaagatcattgcagatcgcttggtgatcgcattcaaccatggctcaggtatgtagtgaggacgcctgcttgctgcgactaaacctcggattagctccgatcgttgggttgaaaaattctgaccgtatcacagaaagctaccaaatctctagcggctcgcaatggtgctgtcctcagccgtacgcacatcatctctgctgcattgcacctgctcttcctcctactgcactttgccttccagcggccgcgttcactgaagccatacttcttcctggccgttccgacccttgcaattgaatattatttggaccgaatgggccggcctcgttataatgaagatggttccctgcgttccgccggcgaagatctcaacgccaccggtctgacggagtatatgtgggatgtactttactggacccagggatgcattgttactgtttgcctcttcaatgacagggcctggtggttgtggactgtgatcccattatactccgtatacgccgcctacaccacgataatgggtgtgaagaagggatttgctggaatgggtggtggtgatgcgggtcaagagaccgatgccccaaagagcaagacgcagttgaagaaagaaaagagaggctcgaccatgaagtataggtgatcagagagtggaggatatgtacaaaatgagttgatgtagaatgggaactccagtcatttccatctttcctagttggatgccatcttgaccgtcattttcattctatatatttatatattggaacagaggaatttcctactacccccctcaacctacgagcttggctctgacgctgtagattttatataatatcatgatttcacttttctctccacataaacataacacgtgtgcattgatttctgaggcaagattaatcgaatccgtttatatgtgtagattcttgccattacctatgtaatcatccttattagcccgtttgataggagggatgcacaccgtgggtgatagctacatacacatcgaggtcgggatacccaaccgctcagaaattacacaaaataattccataactacatatttagtttcaaaaaagtcattcgttatgtactgaacatatctcacattaaacaagcctcgtatttcaaccaggaagtgagtagagaggaaaattgagatagagcgggaaaaagaaagcaagtctgtgcatgttgcaaatcatgagcatatggccatcgtgtcaaattatacggggaataatgcgtcgtgagccgcgcatggcattcccaagacatgggtttctttcggaacaaaatgattaagtccggatcaaaagaagaaaaagaaagaaaaagttgagagacgctgaaaaaaaccgatcaaagttcatctttgactgaaactgcggaactcttgatgctgcttgttgtatctttaaggtgggctgtggcggtctcgactgcctcgaagataacgttgctagccggtagattggcggctagatcagccagctgagacatggcgtcctttttggctctagcgagacgaatagctgcactctccactgcgctgggttccttgccgtagatagcagcgctggctgtagattgaatattctcaatggcatccttagcgacatcgaggtaactcgattccttgccgtaaactgcgctaatgatctgagccgatgctgttgagtacgcatcagctgcggcatcagtggctttctcgtaggaacccttgggggttccgtagataccaacgctggcggtttcgacagcagcacggagttggttattcgcgtgttgtatgatgtcctctacgctcggggcttctgaaataacagaagcagcgacggaggacgcagatccataagcctcattaacgtagctagaggcagacgagaaagcgacagccgggtacggcgtctcatatgcggctctcagtttgctcagcacactctccgtatatgaaggttgcttgcccgcaatcagttcagagacaagcccttggactgcctcaaactgcggacgcccattattcaccacttgctgcagaaacggcgttggcgcaccataaatctgctcactggctttcgagatgaggctttcccatttttcaggtacttggctataaagggactctacagggcccgtggaggttccgtggatgacagagctagcggaaatggaagccacagagagagacgaagaagccgcagagagggcagcattgtatcgggatgaagcatcttcaacaatactttgtgctttgccgccatctgcggaagacatgaccgagcttgcagatgcgacgacagcggcaaggctggcagaaactaacgaggacacatgctcgtattgagatcctgcttcctcaatgatccccttagagcttccggctggtgtgggggttggagaaccatagaccgcctcggatgccgtagagacaaagacagagtagtggtcatgggccaacccgactgcctcgtagtagcgacgctgcgcatcaaggacgaatggctcgagaccgccctgaggaatactggctgttgtcgctggtggctgcactcgagctaattgttcagatgctaagctgagtccatggcttagccgggaagacgcaatggatgagatatgggccagaggtccgacgttggatggtgtcggggtagcacgaacactgcggagcttcgattccagctcatctgtggcgtattttagagacccggaataggccgactctatggaagcgagaatctggacatgaacaggagcgctagattcggctattcggctaagaacttgagacttcgcgatctcatagagtactttagcctgatgtgtggaatcagcaaatgttgagctggctccgtccatcaaagattggacaaccggtgttggggtgccgtagatgacggacgacgcactgtggcagaaactcgcattagcgataattcgatttttgtgcagttttgaaacacgctgaatatgctatactacttacgcggctacagcatcgctatatttctcagagccgtcgctgtaaaccttttcgacagggctgagaggggtgccatggataacggtagaggcggcggaccaagcaacagagtactgttcactggccaatgatgctaccttctcaccgactccgttggtcgtcgatgcaccatagacagcttcgctaacagcatcgctggccccggcgtaggtatcgccaaccttacttgccagactgtcctggacattgtggctctcatcatctaggataggcgcttgatgcaaatttgcatctgcagccgcaacaccaaaggcgggtcttgcggagggctggttttccaccacaatatcatcgtccataacagactcgttaacgccatcaaagtccgcttcagcattgacagccgcggaaggctcatcggtaaagggggtttcctcgtaagcgtcatccgatattggtgttgccacctcttcggaagactcatcgttaccgaaatccatcttggcagcttcttcgtcagattcctcggtctcttcttgggccttgggccttgttggcggggcttcggtgcgagtttcaaaatgatcgcttacttcacgagccgcgatcttccagatcccaacatcctttaaccgaacaagttccctggcagcttgttcggcttcatgcatgccttgatctaagatatcactcgccacggctctggcgtcagatacggatttgtggttcatgccgacatttcggatgtcgttacgccattcctcgagttgggctttgagggcatggtactttgcccaatccttgtatgtgacaccatccatccacgcccagcgcatgccaatttcttgtaagcctagattgcgaatgctgtcgagaacatctattgtcgaattgacagcagcagtgactcggcgaacgagttcgtcctcgaacgagatagaccactctcggagtgcatgggcgcgatctctcacagagatagcagaagttcggatttcccgaatcagcaagtcgctagtagacttctcgatctccggggcgtccacctctggcattgaacccgcaagttcattgatgcgttgtttcatggaggaaatctgctcggctgaaaccgactgaagagcggtagaaaggctctggccatgggtgttcgcgctgcttgcaaccagggcggacacgatctccccaatacgtccctcaaggtcttcaatacctttatcggccgcgagagaaaatctttcctgccaccgccaaaggtccgaatctatctcctcgcggacttgctgggcttgctcggtaggagttagagtgggttggacggaagcctggggcgtgaaggttgaagtcatagtggtcgaagtgtggatttgttcttgtgacttggtagtcaaagagctaacgggctggactgttgagctactaaattttatggtcagcatgctatggactggataaaccaaggaacttttatgtacctatccacgtcctctatgacagcgcgaagtcgcttgccctccctgtagcttgccaatcgctgcccaatcttgacgagctggggctccacttgttcagagtaaagaccagtaacgtgaggccatagtgagctgttagcaaagtagatcgcggatgaccaggtatactgcgccccgggcatgacatgggttgccaaaataccctggccggtggagtaaactttcccgatgaaaggttttgaacgcgcgtagaaagggaccagttggccctgatagacattgagcacaacggtgctggcccattggcagtatggagagacaacatcaacgctttgctggacgtggggatcaatcttggctaagtaaacctggtgaaccttattttgagcagtccgtagtcttggtgagacttgatgttcccattgctcaatcccatatgcctgagcttgcttcaatgtcggcgctccatacttctcatatcctgatttggtaaattttgatgcaggggtataaactcgctgattaaaaactttcacgtaaggccgggcttgatcaacgtaaggcgccgcataaatatcataatatggcgtcacataaggttccacgtgtgaacgagcaatcaggtagggcttgcagactcgaggtgatgtctctgtgaggtcttcgagatgggttgggcacctgaaaaatggcgtcaagagtgcgtaccagatacatagcctgagaagtgaagatgttaaaaggggcttttcgctgtatacaagtatggcgatgctatcactcacctcacgataagtccgattgtccatcggacgaagccctttctccgtggcttttcaagatccattcggccctttgctttggtcgtgacatccgtcacttcattccctttcactaccatcgcaactgaggctgaccttgtcgaggccacgcgatcccctcgtgatattcgaggtcggccgaattcgcggaggacttcccttctacacacttagatcgagtcggctcagtatgaaattatcgctgcatcgggaataagctcacagcccagttgaatataaggcttttcgagattgtgctcgagactgcgtgaatcaaagcaaattagctgctgtaggcagaatgttcgcgtcggtcttggcgttagcaactttcacgggaggctaggtcaatttcaagaagaatagttggttacgaggaacgaaaggtcgaacgaatgggttttaggtctgatgagaaagaaaacgcagggacaactttattacaatatgaggacaaggcgatcgcatatgacacaataaatcagggatttgtttttagagctcagtgaggtcatcggtggctacacgtactgcatatacagcaatacccagctactatcgccttgacaagcaggtattgtcatatttcatgtattgccaaaacacaccgccgagtcggcgaattggaccccgggcagctacctggacaggctgaattgctttgttacaatcaagcaccaatgatctacagattacggttgtgaggtacgatactcctatcatataattgtcaatcttggcctcactaatcattctattcagttcaaatcggattgcccaccaacacaagccttccgtatgttcacaacctttgccattcccgcttgactaggaacatggtgaatatctgatcaaccaccaccgtcaaatcggcgagattcacgaattatggagcccgcagagaaccaattccgcgataatgcggataataccgcattccccgatctaatgaacgacccggcttatgacgaaagggaaaagggatttgacgacttagatacctgtcggatatgtcatggcgaggcgacagaagaggaaccgttgttttacccgtgcaagtgcagcggtagtattaaattcgtccaccaaatttgtctcgttgaatggttgtcccactcacagaagaaacactgcgagctctgcaaaacgcccttccgatttaccaaactatacgacccaaacatgccgcagagccttccagcacctctgttcgcgaagcaagccctgatacaatgcttccggactctagtgacttggttgagatttgttctcgtagcatttgtctggctaggatggctgccgtggtcgatgcgcgcaatctggagggcattattttggcttgctgatggacggtggtctgccaatgaaaacgttcggaaccaggccgcacaaaccgctcaaaatggtctcgggcaactgttctcaaatggcagtgcagtaaatactgcagtaaatactgcggtaactgactcgattacttcgtcaatttctaatgctgtcgtctcatctactactgctgtaccatctgcacgatcgtcaattctcaatttcgctgccggagagccgctcatgcttaccctcatcaaaaaagtgatacccacacttttcatgccagcgtttacctcgactgtcgggcaaggcaacggacaggacaacgtcacggttagctcaatcaaacctcggtatccgtcatggctttcggacgtgaagttcttgaactcgttgacaccgtacccgacaatcaacaacatgatcatggatacattagaaggacagctcatcacccttcttgtggtggttgcgtttattctcctcttcctgattcgagaatgggttgttcaacagcaacccatggtaaatattgcagaaggagaacgtgaggctgctcttcagttaattgcaaatgccaacaatcggataaatgatcgattcaatgaagaaggtggtattcgacaacctgaacccattcccgctcgcgcggaaaatgagatcaacaatgaacacgctcaagcccatgagttggacaatgacatccttcctcattttgttccccactccccagctctgtcctcgaatgattccgaatacggtccccctgagtttgaagcggagctacgagactacaatgggaatgacctggaatacgaaacaggaggccctcctcctacggctcgggctctagctttccgggacctagtggcccgtactcatggcaaccatgaagagatgctgcgcattctccgcgaagaggctcatggggatgatctggattggattgtgaatgcgatcactggagcgaccgtagaccaagattcatcagcagggccttctattcgtccccatgatctcgacaatccagaagtctcggacgatgtcgatggtgttaatcttgaagttggagatggagaggatcacccgcctcatgcggacgccggaccttatgcccagaacgtgaatcacgggccgccaactcgagacaatgccattcctgtcaatatacaaatggaccgtcggcctccattgggcatcactgagcgggtgttcgaatggttttggggagatatcacacctgtagcccgtgatacagaagagccagtccccgaagatgacgaacatattgttcaggatccagccttggaagacccattcgtgccctttcccaggatggaagagaggccagcagccgatgctgctgccgcgaatgccgctgccgtcgcggatgccgagctggaccctaacgatatcgatgcaatcgaaggggacgatttcgaagggatcatggacctcattggcatgcatggtcccattttcgggcttttccagaacggcgtcttctgtgcccttctgattgcgttcacagtagccatcggtatctggctcccgtatctatggggtaaaattgctcttgtgttattggccaatcctctcgaactcgtcatcggtgttcctatcaccgcggttgaagtcgtcacggacattgctcttgatactcttattggtgtcgtgggatatctcatgtactggttcagccttttcttcaaaattgtactgagccctgtcggtgctcttttgcctattggagaatggattcctcgggacaactcagtcactagtgcatcgctttccctcatcgacgcaagcagtcaccgcttgaacaaagtgatcaaagcattcctggtcttccacgagtctgatattccaatgttctcagtgctctcgcaccaggcgcttaaattacatcaggctcgcctcggtgctgtgttccaatcgggctttgccgctgtcaagttcatcgtacatgacttccctcttcggcttgcgacgctcggtgttccccgtgccctgtctttcgacattgaccttgcccatttcaagaatcttattggccaagcccaacaacaactcaccaccttcgctaaatcatcgcttttctcgatgcctggaacaagatttatgaacgcaagtgcagcgaaagcagcctctgccacagtgccggtcgattatgacctagcagtctgggattccaaggatcgtgttattgctatcttcatgggctatttgctagcattcatgatagggcttctctatctacgaatcacagggctgctctctggtgctgatcggggacaaaggatcgagggcctgcttgctgaggtcctgatacaagccggaggagttatgaaagtcatcctcatcatcgggattgagatgattgtcttccctttgtattgtggcagtcttcttgatcttgctttacttccgatcttctctaatgctacagtggcctctcgtattgcttttactgctgcatctccgctcacttcgcttttcgtgcactggtttgttggcacttgttacatgttccactttgccctatttgtttccatgtgcagaaagattttgagaagcggtgtgctttgtaagtgcctgttatctacgtgccagaccttgattggattgctaacggttcgactctagatttcattcgtgaccctgatgatccaactttccacccaatacgcgatgttctcgaacgcaccatcactacccagctccgtaagatcggtttcagtgcccttgtatacggtgcgctagtgatcctttgtctaggaggtgtcgtatggggcttgcactttgctctcgatggtgttctcccgattcattggtcggccagtgcgccgatgctcgagttcccggttgacctcctgttctacaacttcgtgttgcctgtagttattcaatctttcaaaccctcagatggtttgcatgatttatatgactggtggttccacaagtgtgctcatttcttgcgtctcagcaactttttctttcctgaaagacacctggaggaagaaggctaccacgttcggaagacatggtggggtattctctctagaagcgagggtgactgggaacacccggtcgttggagatgaccagcaggctgcagctgagcgggaaaatcgtgacgtctacttcctgcgcgatggtcgatacgtgcgcgcccctggctccgatcaggtccgcattcccaaaggcaaccacgttttccttgaggtcactgaggacaatgaacgtgttgatgggaagcccgatactgccgatggactacatggccgatctagcaacatgttcaccaaagtatacatccctccctccttccggagtcggattgctgcctttattcttctaatctggctctttgctgcaaccactggggtaggcatcactattcttcccttggtcattggtcggaagatcattgtgtcctactcctctactccggctccagtgaacgacgtctacgctttttcaagtggtctttgtgtggtcggtgcacttgcctacctggcgtactactctagcaccgcactaaactttgtgcgagagaattcaggcgcataccttcgttcccctcgccaagcagcccaaaccagtctaggcctcgtgatgcatactgctcgacttatctacatgacccaagttgccattatcctcctaccatcactcttcgcgctgctcactgaactatacattctcattccagcgcacaccctctttggtgatggagagtcacatgttgtccatgtggttcaggactgggcgctcggggtgttgtatgttcagatggctatcaagttgactttctggcagccccaatccagggtggcagctgcggtcaacagtgtcttccaaaatggttggctgaagcccaatgcgagccttgccactcgtgcccttgttcttccaatcgttctcttcactgcagcagcggtcactttgcccttgtcatttgggttcattgtgcgctggacaattttctattcccacgtcggagtgcagcctaatatctaccgttattcttatcctactacactcttgattgtgctctctttatggatggcacatctactgctgagacgagtggcggtctggcgcagcaatattcgcgacgaagtctacctcattggagagagactgcataacttcagtgagaaacgaggacgtgtgacggtgtgtcgcgggtgatgacaggatgacgaaatggatggatgtttgataattttggcctggtattccagcgactctcttaccttttagcttcattggatgtacatttaactcgaacgactagaatccaagtattagttacttaggacctttcatcctgcccgctcgccgggattgtgcctgaggcatgatttttatatacgtaacgggtattggtaataccgtaatatcaatattcattacctgctgcctaccccgtggccccactattggccctctcttgtgaccgctcattggttaggcaacaggattccctcgatgcgccgttgtgtggttatcggccttcatcgccatcctcaaggcacccattgaaactgctcttgcaagtctttatcgattcattcctcctgtccgatggattgtttgccttttagcgactctcactatgtgttcttgaacgttccctctccagtgccttgtctctaatgctcgatactgtatctgtcattcttatcgattccctccgtaatcgccaagatgtcagtcctccggcatggaggaggaggcggctttctccagcggcgcctcacgaaactatataccgatacgaaaacatcctgcgagagtgttacgacagcctccaaagccctcgatgatcctgagctcgtcgccctccacgggagtttccagaaacagagggatcgcttgctagcatggggtctagattggagcgacgcaagcgccgcgcagcccaacgacatcgatgaatcgttgactgctgcaggtttcagcgatgtcgttgagagtgtcatgtcatcgatccaagaactactcaacgatgccgagcaagtacagcatttggatgcgcccatgcttccctcgaaggaacggaaggtcgatataccatcgaaggatacccttggtagcagacccgtcaaaacgcaatggacagaagaagatataactcgctcaaacaagatcttgaatgaactcactggctgtattgataccctttatgatctctcgcgctcccggcggacaatggcttccagcatgtcatccagcaggaacagcgcgcgccgcccacgacccaatcccacctcaacttatgattcatctcatggctcattctctgattccaaggagaaagcacaaagcccgaagcaaatgttcgatccattcacctattcgcccacgaccgcgcaccgtgactctcttaatcctttcctgcccctgaaccatcttctcattgatcgctcagctctgcaactatacggtgcggcccacgataatagccctcctccgtatgaacctgttgcggcatcttccaattcgcgtgccattggacgcctgaagtcatcggcatcgcatcttctcacctccacaaaagagtcccatgtctccgtgcttgtcgagtttatgcctatattggcggagtcaaaaatggataacaaaagtgctcgattggaaaagctccaaaagtctattgagcaattgctacagaacgccaggatctcacacttagggttgatgcgatttttgggctactgcattgataactcgaattctcgctatgcattcctttatcagatgccggttgactacttcccattcctacagaatccgagtgacttgttgaaggagttaaagcctaagccattggtcgctcttcttccttcggcagaggagtatcgggagaatcgagttccgaaccttgacactcgctttcgattggcttacgatctcttgatgtcctctctccacttgagaagtcaaaatgccgttcatggaaacatcaacagcagcaatgttatcttctttccgggtcgtagtgacacgagtgatgatgaaagtggtcttgcacctgatcttcgccgtccttatcttacttctccggcacggttctctggggatggaccaacccctgagccgttatcttcggcaatgtatcgtcacccagaggacaagagatgtgttgaggatgatggcgcgtgggcctatgatctttactcgctaggcctcattttattagagataggcctatgggcaccagttggacgactttggaagatgaagtacgaccgttcatggttcaagcatcgagtggaagatctctatgtcaaaaaacttggcccgaagtgcggcggtgcttatcttcaagccgttcagttgtgccttgatgcccccaacttccacttatcgacacagccgatgactgacctcggtcttcgtgttccacaaatctaccactacccggtactcgacttgtcggaccctgatggcaccttctctttttcaatgaatttcatgtacacaatctgcaagattctttggtcatgttgccggattgatatcttttcggcaccctccgcagaagaattggatgactgcctcccgcttgctcttgtccctacccccgagccggtcaccattgaggataaagtcagggcatacaaatcatcgaagcgcgagatgtctaattacgacaaacaacttcccacaattcctaccgatgcatggggtgtcgtgaatgaagacaagttcattgaaaagccacacaaaaaacggaccgtcaagagacttccgcacttggaaataccagacgagcacctacaagagtggaatttccaaataatgcctcgagtgagtcgccttcttcagaaggttttgaaggagtcttctgagtcgtgtggagtaaacctcattatgactggcgagtcgcctgaaagtgccaaaacgacgatttgtgttacgtgcgccagtgtgaagaaagttcgaatggcccttaagaagcacttcgctcttggtcgggatgactgggatttgattgtcctccgtggcgatatcgagcggtccaaggttcctcggaacaggcgccgaaggccggctaaggctcgcccgaatgtgtccaatgatacaccttttcgccagcgagagctcaatccatgccatcagcagcgacctctgtgcggagcatctatcggcgcctttcagaacgaagagcacttaccccctgtctcatatggtggtgccgtctttgtcgatggcttgccgtatggtctaacagttcatcacatgttagaagctcctagcgaagatgagagcgaaggcattgactcaaatcaagatgccccttctcggtccgcggggaactggccccgtgatatatcaaatatcccacatcctggattcacgtacgactatccagaggatgactcatctgacgtgaacttcgacttcgaaatttccgatctggaggacgaggacgatccatcacacggtcttgagtctggatatgaagaattctggctttcagatgaagattcatcagatgatgactccgtcggccccgatgacgatgacggtgacaccgcgtccatcggcgatactgctggtatcgaacctggcgaagaaccccggctgcttgtcactcagccagctattgacgatgtacacgaagacttttttccatctccagaagatcgtgatgacgagcacctagcctcacattccctcggctatgtacatgcatcatcgggagtacggcgctggacccgaaagggcctgaaacatgaaattgactgggcgctcatcaaagtcgatgaagcccgtatggaccctcgcaacatcgttctcgacactactagatccagtgccgctcggccgggacgccctatcccgccacaacccatatttctgaaccaagtagcccggatggaggagctaggtggcttgcaagttcattgctgcggccgcacaagtggactgcaaacagggcagatatccaaggctatgacattggtcaaacttcagggacgacattcattttcaaccagcttttccgtcaatgggaattttggaggtaagaggtgcacttcagcggatccatgtttttgtctatacgatccttaattagatacccttgtttgttttttcatgcacgcccatcatttgttgcccttctaagctggtaaacatacagcaccatctcaccctaagacatcggctcgtatcgagtaagcatttcatgaagctaatctcttgattcgacagcgcctggcgactctggcgcatgggtcttcgaccgtcccaccggccgtgtttgcggccatgttctcgcctggtccgcaaaaagcaacaccacctatatttcccctatggaggtcaccttcgatgacatcgcacgcacgctccgcgcctcggtcgtctctcttcccggcgacccgaaccgatccatgagctacgtcgaccctacctcctcacagtctgctcaataccgctaccaagcccagcggcttccaggagacttgggccgtttggcttttgggtctggaggttctcccggtccgcctgtaccgccctatccccatcattatcctccccctcagccttaccattcagcctatggacgtcctccacctccgcctccaccccctcccggctcccgagaagctcatgggcctgtgtacagtggcccagtccctccaattccgccgtcacttctggctgggccccgcaatgtcgaacgacaacttgcttgatttttccagattttggaaaatctagattatgggaataagtttttgagactcatgtcatattggcctgagtatgtcggtttgttatatgattatgttttacggatgttgaggatacccatgatggagcgatgtttgttgtatttttgttcacccgctataaaaattatctgacgtgaattattcgaagagcagtattcatgaaaggggttattctcgattggaagtagatacaacacagccattgagaacatactgatctcgagactagtgctaactcggaccgtcggcttcatggtatcaaccctgcccagtggtttcccttcctttttacgatcattgtggcccttgaactagaatgcgtgtactattaccatttgcaaccgcaatgcctaacaccatatcagagaggcccgaatctcccatcttaataaattatatgaaacgccaggcagacatagctgataattttgactgcgttccaaccttggaacctcctaggtagttagcagttatttattagctaccattagctaatagatggcggcggccacccgtagacatccaatcgtcttttatattcctaattctgggcccgtttcctctgtatatatgcccttgctattgtacaggccatggtatatcaaatcccctattgtattcaagccagaatttctacttttgcacaggctttcacgaatccaggactcaaacattagctaatcatttgcagaggaacatcccgatgaagaccacatagccttttatatcagtatttagagcaatagaagtagtgaactaagtatacagagagaaaaaaacagaaagagaatgggattcactacatgcatctgtttctatgagctattaaaaatgctcaatggagaacaaagaggatcgaaaaaggattatagaatgtcatgagttgaaaggtaactcattatgaatcacgcccgtcaagccaactgatctacatttctatataacttctacggacttcataatttgttggctatctatggggcattgtctcaagggatattgataggactgatgttcctccatattggtgcattgttctttcatgctctctggtccaaaataggaaatgacctatcaatagctcgtgacttgaaaggtttcgccatttctgtctatcttcgaatttctatgtaaacaacgatatcgactctttctccgcccgaggcaaacgcgtcttcgtcacagcgcgtccgttccttcatctctgtttacttcttctctcattcgttccttcatctctatcttcttcttttctctcatcttcgatattttaccaaaaacttcttgaatctcataactctcatatcttgtctttccttgaatccggtcatacctcagcggttccgcttggctctaggattcaacgatgcatcatttgcacactttccatggagatcccgagctgggcagtcggcccctcaaagaatggccatgcagcccggatcgagccatcgagcttctcaagacgttgtatgacagtgataagcctttcttcacgaagaaaaacctgagagccgtctccaaccaactcaatcgtcgctacaatacacgaaaaaagaacagtgaacaaaagcaattggtctctgtcaagggcctcagtggctcaactatctattaccaagtgattactgggcgagtgctcataggagcagggaagaacgaagactgggagatgtaattcgttaatgattgccatccagggctcttctggcacatgaccctagctaacacatccacaccacaacagggaggaaccaaagatccgatacctttgctatgagcagctcacttcgtcagtgaagttggggagcattgaactggttgaagccttttttccattgcaaattgagcattttatgctcacacgcgcgagcgacaccaagctgcccatctccaccgagtacattgagaaccccgtacctgtggacgtgactctccggaatattctggatatatggaagcacaccactgaattccagaagctcgagtccctcctcaagcttgtcacccctcgtaaagtcaccaagattgtcggtatcgcatctggatcaatggaatttggtcccgacgatgaggattgcacctatcgtagcgccatgcagcattccatgatgatcactatcaaagagtctattggaaagatgacagataaaaagatcaaatgctatgcccaggatcctcgctacaccgccgttgacacctgggctcttgcggagtataactgcgaggttctggaggaccccaaggctttgcttgaaattgacgacgactgtattctcttttcttgctgcccggctcttccattaaaggagatcactgttgactttgctcggcctgctatgcttatttgggatcgagttgtcgatgaaccaaaccatgggcggtaagtcttattctgatgttgtattcacctcatcttgcttactgactagttcgcctagccacaacccgaactccactcgcgtacagaacatgatcagaaatgaatacgtctgccatgaattctgggacttgcgcgaaattgggactgctccctttaggtctgagcttgttgcttacatccgccgccaggcggagtaagatcatcgcaaagatcatatggcaaattaaggtgtgtcaggggatgggcaatgtgtctatttggccttgggggaaatgattcggtttctatgagttttcaggggaatttgtaaggccaataggagtctctgattgagtgtgaagccagtttatgtttgaagaaagcatcctgatttccgcgtctgcacaaagctggagtcatgtaattgtacccttcattgtgtatttatgtctttgtttctctgttgatttagtaattaatctcctctccatgtcacaatggtacattaaacggggctttccaaccgcccttggtcctgtgaatggagtaaaagacatatggctgccaaatataacactgccaccgaagttctagagtatatatatatattgcagtgggggtttccagagtaggatgactaagcggctatatagatagttagcaacgcagacaccttccacttctcttctcagtagtcaccccatggtgttctcctctctagcaccctactactcccagtgacgactctgctctcacacctgtttcgcaggcagggttgtcggtgcccctatcctagggtcccctcttcaatatacacattccctaattttcatccagagtatagaaaggtgattgacaacaggcgtagttttagacaataaccgtggacttgggtcctagtgactttgggtcttagagaatcaaacccccgattgtgatcaatgcagaccaccttgttctatgacggacataacggacccacttggggtgacccacttaacgcaaccttatcccaaaaaggacctgccaacttgatatccatagttccactttgtgtttgtatcatgacgcacatttgatgatgatcactaggatctctagatattgtcgacaatgctctactaattttgtccgcctgtaattttcaatacctattcacctcgtcaaaataatattcctggcaaaagggggtttcgttggctgtactgaaattaaaccagcttttgagttgtctatcgcctatgccatgggatcacattgtatcgtcctccattgaggattctgcaacgtatgcgccttgagaggaacagctgtcggtgatatgatggggtctagtaaattagttgtgtagagtgcatgatcctcggcgtctgatatcgatgtgacaaggcactgagacacaaaacctccacaccaatgagttctcttgcgttggggctagtcaaaggcaactccagggcctatcaggcacatctagctgctcgtgctaattctactcctcctcctcctcctcgtcctcctcctcatcctcatccatactctcccattcatcttcaccatcgctctgttcgagatctgtctcgttggaaaggacgctaagcagctgtaacaacccggcctgtgtgcgccaggcatctgaagatggcaaatttgggccagggccaccaaggcttgcgctatccactgctgaaggctcatccgtgtcaccggaggcagaggattgtttagagaggttaggggccaggctgagtatacggatgacttttgtaggaaagacacgaggaatttctccgccaggtattccgcctggaacgttagagtcgcgccagccgagggtctgcaatttccggtgttagccgttctgtttttatctttttgcaaagaagtcaaaaaggaactcacggtgtaggtagtcataatggcatcatcagccaacgccatgtaactgatcggcacagcaagctgtggtgcggagctggtgagcagcgagtatgaggcacgggcagggttcttcaaattttgaaccctattattgtcatcaagggcgacgacatagatcctatcttgaatctcgaacatcacacggtggttgcggattgataaccaaccaccaaggtcaaagcttgacccgtctgattgacattccagaatgtagctgttcgccgcaagactagcttcatcacggagagccttgcggaagtccgggcatataaagacacgaccagcgcgagagaagcccacgaagagatcgccgttcaacattcccgccccccattcatcatccccatgccagacatgatccgggtcatccggtggtgacagtggaccttcagcgacctcaattggtaccaaacaatcctttcggaaagctccgggtgtgaggggttgagttgttaggccaagtcgcgcagcgcctgctagtgctgcactcgtagaagcagaggcggtctttggaggaaggatgtgatatttttcggtcgactgggacggctttaaattgcctaagagtgcaccggattccttgctgtgggcaaaatagccttttgagcccatcgaataaatcacaatatcttcgctttgatccagatggccaatgccacccccctcaatcctcaggtcggtggtcaacttgggaggtcgctgtgtcatatcgtacacaaacccccgaccctcgttggagacaacacatagagtccaataggacaattggaaccctctcgtgtggcaatcatggcacaatgtagcgatacgccggaactctccacgcttagcaccttcaaggtccgtctgccaaacctcgagcaaatctccttcactatcgaacacggccattccatcctgatactccaagtgtgcgtgtgggcgaactccgtctccgtctccttcggcgtctagcacggaagggagtcgccagaggaggcggcccgtgtccatatcagtgacattcaatccgccaccatgggaagtggaaatgaagaaccggcgcttgaagtcggcacggaatctccaaatgggatcattaccgatttgtaccaccgattcctgactgactggatgcggttgggcccaattaagggcgagcagtgtctggcgcttgcacaggtctttccatgatttcgtgccctcgaatattttgctaaagctgtgggtatcggcgaggaaggagaattcacggctacccccaagcggctggacggttttagcttcggatccataaatagcttcttggtgagtgccgtcgataaattggtgccaagccttggaggtcgcggtcagggacgcaaggccggaaatgggggtgaagtgcaagatttgcaggacaatctctgggggcaagacactgagagggtctactgtggatgatacggcagtcatattttcaaaaacaagcaatgcagagttgtcgcagaaagcaaattagagaggtgggggttcgcaatatttcatcgttctccaccatatatacgatgacgtagccggtttagacccgtggatacagcaaatagcccccggggctccaggggaagaacctagagccttaaaaattttaagcttaaattattttgatatgcccagatttcaatccgccatgtcctccaagtactagattcttcccatccaaatctgcgctgcaatgcctgcttcagttcaaggtacctcattcgctcttccatatgccgaacaaactctcgctggtctgtatagcgaataatatcttttccaagggcattactccgtacctattgtcatatatgacgaagtgagaggctgggaagagttgggttttgctgtaccccgcaagtacgagcgagtacatacgacaacccagcataaattgaaaaatgtcccgtcgcttggcacccaaggccgagcgcaaagcagcccgattacgagacttttctggtttttccctcttattcctcatcaaccatgggtaacgagacccttcagcagttcgctgccctcgacctcgactacttgattataggcggaggtaccgcaggtctagctgttgctgcacgcctcaccgaggacactggattccacgtgggagtcatcgaagccggcccatcggtcttgaacatagatgataatggcgcgatcaatgttcctggtcggtatggcgaaaccatcggctctaaatacgattggaaattcgaaactaccccacagccgggcctaggaggaagatcactaccatggccacgaggccgtatattaggcggcacaagtgcgctcaatcttatggcctggaaccggggtcatcgcaaagactatgattcctgggcggaacttgggaatgagggatggggatgggaagatctactgtatgaggaccagctttctgggattcgcgctctgtcttggatctcacccgctgatctttgagatactgaattccttccaggccttttttccgccgcagcgagaatttccacccaccgagtgccgctcatcagaaatattatcagtcttcctatgatccccaggctaatggaacgaagggccctcttcatacaactcatgccaagcagtatggtcccacacaccaatattggcatgagacgctcaataatctcggggttccatccacgcgcgatagcctggctggcgataatacaggtgtctggaacatggtgtgcacaattgatccagatagtcaggagcgcagctactctgcctctgcatactaccaccccatctcaaatcgcccaaacctacacatactgactgaagcaactgccatggagatcctgtttaattgcgacaatgatgattggtacgcagcaggggcccgagtacgctggaacggactggaagcaaacatcaaagcatacgaagagacaatcgtctgtgccggtagcgtgcaatcgccgcaacttctagagctatctggtattggcgatcaggaagtgttaagagctgctggaattgagatgaaagtccacagtcccaacgtaggggagaatctacaggagcatatgagtatggaatataaacagtgttccttgtgatctgagctgacgtgtttaagtgacggccaccatcttcgagatatcctcgacgattccaacccgagatgacatcctcaaagaccccattcagcgcgaagctgcggaccgcgcgtattacgcttctcaagccgggccttggactgtgatgccctgttcagtggcgtactgtccgctttcgaagatcctatcgcccaaggaatgtgatgaattacacacccaggccaaggaaatcgcgcgagagacaggaaggacacatgacgctattctggctggccaattcgagtacggtcatgcgcgcggtcaaatcgaatatctgttcgaccttggtaactggagcccatattttgtctctgagccaggaaagaaatacgccacaatgctgcaaatgctgcaataccctttctcgcgcggatctatccatatccctgctatgggcgaacacaattatgaaaaggccacaattgatgataaacccgtgattgatccgcgatattttctggggcctggggagattgataagaaggtcatggccaaagcactcaggtggggagatcgaatctgccaaaccaagcccttggccaaactcattcgtcgtcgagtctttcctccccctgccaaggaagcagactctgaagagaaagtatacgaagagtttgtctcaaattatactgtcactgactggcatcgtatgtttcccctccaagattcattcagcaaatcactaaatatgcgtatagcggttgggacctgcgctatgggtgaagcagatgggaccaatgctggagttgtgaatgatatgctacaggtgcatggcgtctattgtctgcgggttgtagatgctagcatcatgccattgcaggttggggcacacatccaagccaccgtatacgcgattgccgaaaaggcggcggagatgatcatagatgactattttgctcgaaacggtccccgatgaatcttgggcttgcatatgatatcttatctatatggccttgtcaatatcttgcccggtaatcgcacaccaagaagggcgtcacgacagcaccactgattcatattttccaagttgtcattgttacacatgttccgagctgaaattctgcaaatcaagacttagtttcctgcgaacctttttcatttcatgcttagctggctcagcatggattgctccacactcaagcatcacccatggctatgaaacatagctgtgcacacacgcaaccctggagatgttccccagacgaagatgctccgtggcacatcggaatttttcaataaaaagaaacaccaagacttaggatggcgcggattgttaaacaaacagaccggggattgaaagcagaactccccgatcggctaaagccgacgtttaactctccccctccttgagaggggcaatcttcttattttgtgccgattgcccggggaattcattcggatatttttccagggtctcactggaaatcttattaaactacattcaacttcgtgagctaacaagacttccacatctcataccatcgtcaactatctctttgcatctctcatccgacacggaaactgattcccgcgcgacttgaatatataccggctcttgctcaacacaccatcgcatatatcctctatcctactatcctacaatgatttctggaatcgcccacatcaatctcaccatccctcagggcacattagaccaagccgaggagttctacgggactaccctcggactcacttcggcgccggtaccggagctccagaaggggacaatcttatggtattgaagcgagctatttccaaaagaaaaaaaaaaaaacatcattttctaatatcaacaggttcaatatcggctccagtggacagcaagtgcatattacccatggtgcgaccgatccccaagctagccggcacccatgcttcaaactgccttcccgtgaggaactagaagagattaagacaagcatttataaccatcacgtgcggggtggtcctgcagccccaatggctgccgataagcctggcgaggcgaactcaggtgagagatgtcttgatatcattcccgcgtacggtttgctgatcaactacagggacccaagggaaagaatatcctacacggttcttcgctcgggattttggcggaaacttgcttgagtttactatgtaaatattctgttttgagtcgagttctaccaaagtgcgggtgtgggatcgaagagaaacagtctaatattaacaatttcaatcgatatggagtcagcagtcctgtatggtctgtctaagcagctactcctctgagttcatttcagaattgctagggaattgtcgactcatgaggtagttagctctggtctgttcagaacaataaatgtacagccacatacgatgatgagcgcattgtggcgtaaatgcgggccaaacccaccaaaccgacgaattggagttgccgacgatcccgttgcacagccccacctgatacttggacgttgcgcttcccttcaatctcaccaacaacacataccagacaagaatacacaacatcatctactatgggtaaatcaacacctatagaaccagctccagcctatgatgacctgtttcatgagcgcggctcaagctcacgaaatggtgtaagtacattactcacccgaagggatgggtcataaagtccagatggttccatcaacatgctaatcaacccaaatgaatagtatgctatggtcggtcaaacagacgataccaccgatgaaacccgagacgtggaacagggtctccacattcatggcgtgcccgcccccatcgaagtgacagcggctggtgagctggatcaacacactcactgtgcggaatgtgatcggcagcaggaacgcagagagcgacgggagagttcccagaaagcatgtggcatggttgcgacaaccttcatcctgatctctttgttcctgatgatattaggaatcgttatcgttggagcttggaaggatgtccgcatgaagaagtcacacggttagagggtgttgagtttcttgaaatacctttgactagaatcatatcgcatagtagcttactgtttgttgtttacttcctttctttctgttaatcatggagagaacttgattttattgaatattgtattgaatattagaattgaatagatcaaccccgtagtcgtatataagaggatccaaaaccaaaaagaaaacaccatgcaatctctaacaagataaaaatccaaccaagagaaaaaccatcaagtcataatagatgtttctgtccaaaacatatgcaaacgaatctaagcagaaccgagatacttgagcacattctcacgttcctcaacaggcaacatagaaagcacttgctgcacaccgcgcagaccaccctccttgttcccaataaggagttgagcaacctcagacgcgacgccatcagtgcgcagagattcaaccttgctgtgaataaccttcttgttctcctcgtaccaagcagcaaccttttggtcattgtgctcgagttcctcgtccaacagaccagtccaggcgtgcagggtgcgcaggtgcgcagcacgaggagtctcgccgaaagcgtcggcaccgggggcagggggtgccgaggcggcaaccatgcgcttgacgatggtctcttcgctaagacggcggcgcagccgccagtagaagaagcggcgggagttgacccactggagaggcttgcggatggccttcttggcttgcatgcggccggcgcggtcgtgcaggtcggcgaattgaagtgcaatctgcatgtacacggggaggagctgttcctcacgggcggccatatttgccttgactgagctgagctgctcgtgggtaagggaggtgtcagccagggagcggcggagctcgccgtaggtcgcatccaggcgggccatggtgtccagttgcttctcgcgacgatacttgatgttcaccataccctcgggctcgaggacaccgccgcgggattcttcgtcggcatacatctccatctggtcggggttgatagtggggtcaacgacgacccaagatccaccgcggagctctccatgaggaggaatatacacgaagatgggctgctcgtacttgacgagagcgtcgacgatatacgaaccgtacttgagaacctcgttgtacatgtcacgttggccaccggagaatcctctccagttggccaggatcatgacgggcagctgctcgccgttgttgaagtcgcgcagagcttgggcggtcttgtaggccgagttggggtaccagacaccaccagcctcggtggagatcatctccatggagtctgggttggcgggatcggcaggggtgacgttctccaccgaacgagtctcgacggcgatcacacccatggggataccaccaaggcgggcacgaccgacaacgacggtgcgagcccagccaccaagggcctcctcaaaggagcccttgtcgaacagaccgggaaggaagccgtcgacgtcctccttacctccgatgagccatctgacatcataagcctgcttggggggagggaagtagccaatatcacggtcccaggtatccgaccaggggcgaatggggataggagcattcttcttgtcgggaacgaaggacatccactcaacgatcttctcaacaccttcgaagtcatcggtggcagtcatgtgagaaacaccgtttttatacatgatctgagtgccaccaagctgaaggttggaggtgtaaacctcgcgaccgagcagcttgttgatggcaggggcaccagtgagaatgatgggctggccctcaacctggatggcacgctgaccgagacgcacaaggtaagcaccgataccgacagagcggcaggtaacgagagtgatggtgaagatatcctcgtaagccttagaggtggcaccggcaatgagaccggaacccttcagacactcgacaccaagaccgtccttggcaccaatcacggtggtgatcttgtggcgctcctcgccctcgtcgttgatgagctcggtgatgacctccttcttcttgctggcatcgaagcgcttcttaatctcgggagtgaggtaaaggtacttgaaaccggcctcgggcttctccggtttgttccaagcaaccgagaagaagggaatcagttcatcggccacaccgatgcgggcaccagagttagcagacaagtagatacggggaatacccaacttgcgggcaagctcagtgcacttgtggaagaacttgtcttcctggggaccgaaagaaccaatctggaaggtgatgtcgttggcaacaatgatgaaacgtctgccgcgggggtactcgggagtacgggcagtgacgatccatccaaccataccgtgggtgttggtaccaggctcgcgagacacctcaacaaggttgtcggtgtcgtccaagaccagctcactgtagtcaatgcactccccaacaggggggcgcttctcatacagggaaggaattttctcggcaatcttggtccagctgttttggaaggcctggcggaaaagctcggggaaatcgtacacgtactgggttcccatcaagtgagccttgtagcgcttgggctgcagccactccttggtagggtacggggtggagacagggcgcagatgcatagatcccagcttggcagtaccaccaatgctctggaagatccactcgcccttctcggacttgcgctcgatatacagctcgatattgataatgaagccgtaggtgttgctgataataacacgcagggggtatggcataccggtagccgggtcggtgcaaaggatgcgaatttctgcgccagtgacacggaggcgccacagacggcggccgaagcgatcgaggaaaccggccagcgcttgctcaacatcgactggctggaggttgaatacaggagagaagttgatgaagatgtggttcagatcggagttgttgttgccaatgatctccagggcgtccaggatatcgttcatgaggcggtcggcctccgagatcagatactcagcggtggggatatcgtcacgcagacggccgggacgaaccacggcacgaatgaagtagcgcttgtcaatagtcttgtcattctcaacgccctttccaatagcctcgtagacgtgaatgttacggttctcggtgaaaacgggtttgatgttgaacttggatagacggccgagctccaactggaaggcaagagccggctcactgtggcggatactcacatcttcctcgtagtggggcccacggaaggtgaagtaaccgggatagacaccttgcttgccgcagatgaaggtgacacgacgaatacgacgggcaaggagctcatccttgttgtcagcgagcagctgcttcatttgttcgacaagttccgcatcttccatgtcctcgatatcgcgaatggcaatgttgcagactccagtgagctcactatcactcacaggcttaaggccggggcgacgcttgccttcaaggctggcaataaggccctgctcgatggggcgcttgatgttggagccaccgagagggaagacctcaagagccttggagaggagctcctcggcatcctccaagtactgcacgggaatgataacacccttgcgcacggggtcactggcagcgtcactcacaaagagggacatgtcgccgatggagttgatccgcttgaaggggttgacctccgtaattggagtgcccggtgcggacggctgagtggagttaagaacaccgaactcacgctggccgagcttgccaagagtgaagtcccaagacaggaagggctgctcattggaggcattgtattcaattccctcgagagtgtatgcacggtaggcacggcgaacgtagacttccagggaggcgagggtgacccaggggtcagcatggacgaagaaccgaggaagaacatcgaagaccgtgtacttcgagtcaacaacctccttcaaaacatccaaggaaggttcgcggtgctcccatccggtctcaccgtagcgagactcgacaacggaagatcgcagaatgtgctccatctgcgacaggcgctcatccagagatggcatagcgcactgaatcagaacctcacgggctttgagggtaactttggcagaagagcgagactcgagctccgtcaacttcttgaggatgggcttgaagtgtgtgccaacattctcgacgaggggctggttggggcggtacatgtccaaaatggccaacaccaggttgttcttcgaaccgatgcggctgtgtgagaggacgatgtggacaatgctggtgatgtcatctttgttctcctcgcggagcttaagaatgacatcctcgtcgcgaaggttatgggtagaaaacaatttctcaacgtcatagtactgttcgagcaagccaatgaagacattgtactcgttggacttcaaaccatccatgtacttgttaatgacctgaaccaggggcaaaagggtggccttgagaatctcagcatcggcagggccgatgttctcttcaatgaagcgaacgatggccttctggagctgcttggcagggaactcggccttgcgggccttggcacggtcaaccacgttctgcagctgagtatccagcctctgaggaatacgagagtgaagcgcagaggactgcgcattccactctccatagggaagatcagggttgcgcaacacctcaacgagatccttcagggtggtacccatgatgacctggttgtcgaaaccgcgaagaatgttctccaaaatgctgtggagtaggaagaatcgctgagagggcttgttaccgagaacggtaggtgagccaagctcgggcagctgaccagtgaagggctgagcgtgcttaactcgggaagggtcatccagggcgaggataccgaggatatcaccggcctctaaagtggcaccgggttgcttgatgagctgcacgataccatcctcctttgcgatgaggggcatgtacatcttcataacctcaacttcagcgtaagactgaccagagcgaatgtgctctccattctcaacggtgaacttgacaagcttaccgggagagggagagcgcagctgagtcggatcgttctcctgctccaagaggcaagttttgccgtcgacactgagacgggtggcagcagcctcctctttccagtaaacgttgtgactgcggccgctgaggaggaccagcaagccaccatcagccagagcacgaacaccgactgagcacttggaaccgttgatgaagaggtggtagctgtccaagctggcacgagtggcggtgaacttgtaacgctcgccttcatagatgaagtcgacggggaaaactgtcttcaagatctccttggacgggacctgaccctttcctagaccattgcggtattcctcaatgccagcctcgctggcgaggtgggccttggtgacggcaccacaaatgatggcgacgttctgatcgggacgctcagcagtcagcttgttagagataagctggtcaagccatccagtggtgatagtgttgtcctcgaatgcaggggtttcgagaagcttgatcagatattcgacagtggtgcggaaatcaccacgaatgctcaattccttcaaggcaacgaccatatgcttgcgcgaagcggatcggttctcgccgtaggcgaaaatgtgaccaaattgactgtcggagaaactgtggataccaccagcagtaccgacagagaagtaaccccagacgttggaggaactgcggaagttcagctcgtgcatggtaccactggaaggtttgaaaccctcgccaggatcctcggatgtgatacggcaagcagtggtgtggcccttgggctgaggacgacgctgggtctggaagctctcttccttggagaagtcgaagtcaatttcggtggaggcattggggtcgacaccgtaaagaagacgaatgtcacgaacgcggtgcagggggacacccatggcaatctggagctgggcagcgggcaagttgactcccgaaaccatctcggttgtgggatgctcgacctgcagacgaggattcaattcgaggaagtagaatttgtcatcggagtgtgagtagaggtactcgacggtaccggcagaaacgtatccgaccaaccgaccgaggctcacagcagcgcgctccatggcctggaaagtgggctgtttcgcaatagtcacaggagcctcctcgataatcttctggtgacgacgctggacggagcaatcacgaccgaagagggaaatgttgttgccgtactgatcagccagcaattgcacctcgagatggcgagcgttaccagccagcttcataatgaagataggcgatcccggaatctcgttggcggcggcgttgtacaaggcgtagaactcttcctcgttctcgacctttctaatacccttaccaccaccaccttcggaggccttgaccatgacagggaaaccgatttctttggccttcgccaaaccctcttcgggggaaaaggtgcaaccctttttatagacctcatcctcgactgtcacgataccgtgttcatcgagtttcacggcgtcaacaccggttccagaccagggaatacaaggcacaccggcgtgctgtgcaacaatggtagacgaaatcttgtcacctagcgagcgcatggctgaagctgggggtccaatgaagataatcttcttcggtgacgcagcgagagattcgggtaaccgagggttttcagaggcgtgacccctacacaatgagcgtcagtatttcgtttctaattttcctctctcggtcttctcggtatctccaagccacttaccatcctgcccacacggcgtgaacatccatccgctccgcaacatcgacaatcaactcgacgttggcataattattattattggttccaccgggaacctcgacgtattggtcggccatgcgaatatagtcggcgttggcggtcaaatcttcgggcgtggccatcacggtaaattggatagcccgctcgttgccgaaggtctcgtaagcccatttccgcaccgagcgaatctctttcacggcggcgataccattgttggcaataagcacctaaggaataagtcagcctcacggtcaatttcccaattgtttcccctcgcaaccacggttgttctttctatttcctacgtaccgatgtgataacggagtgaccttcgtgggctgccacgaaatctttcacaacgctaggaggtgctgattcaagagcgttgccaccgatgaaatgtgagggaatgtcctgtttgctgacagtcgagccgttgccatttgtgatactcatgatgctgataatcacaggtcagattcccgtataggaattgagattctgctttcgcgcgggatgcaacagcgctgattaaaaagtcggtaatgtacaatgctgggagtggcggaaagagcccgagtggtggacgtgcgtagaaaaaggtaaggtagagagagggggagaagaggagtaagataatcggcaggagtaagctctggggggaagaaaggccaagtcagcatgtgtagttcaagatctcggggcctgaagaaagatcgcgtcgaatgcggaattggcctgccaccggatagggaaagggtagcagtactaaccgggaaccaccaaaccccgaacaagaaattctatgtaagattgaatataggaattgaagagatgcagaactcaagttcaatcataaaaagtccacggggggaaaattgctgagaagatgattttctggaggtcccacccaagtggagatgatcccaactggctgtgattgattcccttgaatggccgaggacacatgtacctccccatactgttaactatgtaaaggtaccttcccaggaacgggctcccccaactccctggctttgttgggccgggttccactataatctgttgctcaccacttctgccgatttttgatttgcttttgatttgattttctttttgttttagaattaaatgttgaagagaccaatccaggcgtcactattaggtagtataaaaggattcactgctagttcactaccggtatgtaactatacatatcctatgatactaccccagtttggtcagcagcggaatcatttgaaatcattcaagattcaatagtaatggaattactcaaacttgggaactccaaggtcagactgtttgaacgatacagaatacatatacggagtacatatacggaactccgtaagtactccatacggagtacggagtacggagtactatatagagatcgataatctagattcaaaaatatgctccacgtcattgccaatctgagaatggcgtacacgctatcccaattcggccaccttccatcattcaacacgatcaaccttccagggtttggtgcaaattgcgtatagaaaaatcctcgtagaccaatcatattcgtgaccaccatattccaactcaacccattctccccagagccatggatctgggccacaactcaactacaacgccaaaatggacggttaacctacgttgtacatacaatttataatatggagcataacatcatgggtattattcgatcttaaatgaaaagacaatcgctgagacacagcttagaacgtccccagaatccaccgggggccatatcgcacaaatgaaccagacctggctggtccgagaccggtcaacatgcagaactgtacaggaagggatgtaaccagggcggtctgcaccctcactcctcttgcggaatgcagtcgatcacagtcaatcttagaagtctgtaaaacaaacgttgaaaaataaccctagcacaaaccacccagtcactaaacccccatgcaaattccataaatactagtggcgaagagaggaattaaaacgtctctcccaagtcgctgacttgggtcttcctgtttggcggcggcatggtaccaggtccgatgctagtcttgaagcttcggggagctgggatgccgctgatggttcgcttcttcactatgggggttggggtcgtagtcacggatgggcgttgaaactcctgggagatgtggggaactgttggcgtggcaatatcttggtcctcatcgataagagacatgccagcgatgttagggagttggccggcatgattgctaagagatgaccgaggccgccgggcttcggtcatagggtttgtcgagtagtgacccagtggcgttttggccccaggacgactcgaacaactttcgggccgggcatttacgtggacacccgagtgcacgctctggctgaaggagccgcggctagagaaactagttcggctgctcggacgactctcgcctgtccgtccgaatgactgatgacccggtggagggtaagatggggtgctttcactatctcgggctgaagaaccgaggctactgttactcagccgcttgcgagaattcctccgaacagtgatcgacgagggaacgatcggggtgtcgctgattacggatccggaacgaggggatccgcgagaggaagtgtcagatggggcgggaagtcgcgatttggctgattggacgcgctcttcgagcttctgcatcttaccaatcaggccacggatttggaacagtgagccagacttgggaagccccggtgggcgcgaagtgctcattctcgtcaaactgttgcgagacgaaatcgacatggagggagtgggccgactattggcattggcattggcattattaccattgctggtgctatatgcgccattgctgtaggcgagagacggggttcgcgaatgagtggtgcgcggttgagtccgagcgtgaagggttctagagttcaccggatccgcgccaccggctctctgtcgagggaatgttggcgtggagtttgcgtacgggttaatcgacttgcgaatgttcacagacgactcggagatagggggtgaaggtggggtagcggtagatgacgcaagggatgatttagcgggaggcgtggcaaatactggggaagatgtagcggtgccaggcgaacgatcaaagatctccacactctgtggagttgccgggctgcgatgatacaaaggagtgggcttgcggcgacgcaacccatgcccttcggtatttcgaagcttctcttggatgatctcggcttcaatcttcagatctgacagctcgtctcggagtcgttggttatcgatgcgcagctgctcccgctcttgctccccatttctcatttcctcctctagcaagaccccgcgctcaatgccgatgttgtatttggactccatgtcctccagggacgaggtggtgttccgggcttggcgctcatagtcatcattagcaacttcaatatctcgaagcttgagctgcaaagtgcggttcgcgtctcgaagtgtggtgatttctttctgaaggttgttctgcacagcgttgccttcggttttcgactgcttgtatttggtctgccagcgcaatgttagcacctgcacaattgtgagcaatgagcatgatcccttaccttccactcgtcgacttcatatcgcattgtgtcgagcttttccttcagttgccgctcccgcttttccgaagcttcaatgtccttctccatctcagcctccagctcccggctggaggactgaaagtccgcaagctccgcctccagttgttcatactgagctttgtaatgagccagttcatctctgtaagaactgctcgtatgcttccgttcggaagatggctcatcgacggccggcatcttcttgcgttgggcagaggaccggtcgcaaagaagacgtctggacgacgagtgtcgtccaaaattggcgaaagtcagtacagactgtacaccaggctgtcttgccctgcagatcgttccagcccctctcaaagactcataggttgtgtggtggcccgatgtcaacaaccgtgcgttttgataagagcccctcgccgaggcggtgacgcaagggattgattgcggtacctagtagtttgtccctctatagagggaggaagagaagatcgaaggatgtggcgaactaagatgtgcaaagctgggttaccttcgacccgcctcgtgtcgaaaagcgggttcgattagatcgggctgggagaaaccgatgttgttgttgcggtcgtcaggggccggtagatgcgctagtcctcatgtagcagatctgggctcagccacccaccgctcttttggtacgtcaaggcagaaacatattgcctcaggcatttaaggcactaacacgaagctaagcctcattggagctgaaagtgatcctgatcgacctcagccccgtgatctggactcagcagtcgccagtccccagtctttaggtctctagggcaatcaagtcggagaggtaagtagctttgtctatctttcaatatttgcactagaactctctgtggcccttcaagctccaagcacaagtgtttattgcctccagacactaccctggatgttatgcccacgcacgctgttcttaagatcgctgatcatcctgtttgcttccacgcacttgtttacccccgattattcgcaagctccatctatctatcccagtgttgaggcgcatcggctaaacgtgggatgatggtatgacatctgaacttacagtttccgccccttaagtagatcccgctcagtgaggctaaggtccagctcgatctatcaccatggcagactcaaccgatctcaaccttgacgatgcgcccagcgaccttcaagacatccccgaactagcaatgcaattagttccgcctccagaggggacataccctgacaagtaagatctcatcccgtcgccccttgcctagtgggaccaatatcaacactttatgtctacagggcctctcttctcgccgcagttcaggaccatggcaaggaacatggctacaatgtggttgtcaagtcttcaagcacgcccacggagaagaaacctggccgcaccgctaaggtgtggctgcgttgtgatcgtggcggccactatcggccacggaacggtctgactgaggaaacgcgcaagcgccgcagaacctcgcggttgatggattgtcctttcatgctagtcgcagccggttctcccggtatctggaccctgacagtgctaaatgcgacgcacaatcatggtcctattatcgagaagccgcggcaggtgcctcatcacaaggtccgcaagggccagctaccagccactccatatgattggccccatgatgcttcattcaccccatacaccactgcgcttgtgataattgacatgcaaaaggactgtgggtatttcggactattaccactatcagtgaaccaactggctgattttgtcctagtctgtttgcccgaaggatacatgggatatcagggttatgatatttctagcgcacaggctttgatccctcccttgcaaagattgcttcatgctttccgctctgggggtttcccagtctaccatactcgcgagggtacctagtgtctcgtgcttggcttttagtatgcttttactaattcatatcaggacaccgacccgatctatctactctctcaagtcgtgaggcatatcgatcccgtaacaatgcatccggcttgggtatcggttcccctggtcccatgggccgcctacttatccgtggcgaactgggccacgacactgttgacgaattgtatcctctacccggtgagccggtcatcgacaagcccggccgaggtgcctttgcacacaccgattttgagctcctccttcgcaacaaaggagtgaaaaacctcgtcattgcgggtgtgaccactgatgtctgcgtctcgacgaccatgcgcgaagctaacgaccgtggctttgattgtgtcgtcttagatgatggcactgcagccgccgaaccatcgctacatttgagcactatacaatcgatcaagatggaaggcggaatctttggaactgttgccaagttggaagacgtcattcacgctgttgataatttcaaaaccgtcaccatgaagaagctggctcctcagatgaccgtctaagtatgtactatttcttttagccggttggctatggacgctaggattggaagggatttctcgggcgtttgggactggagttatctcttttctgctgagatactgcagtgcgcatactcgttgcttttctttttcgaatcttttcttttgttgaattttagcgggccagggacttcattgatcccagatagcgtcatttcctgccagcaactttaggtgcaggacaatagccattgcacttctagttcagtttgtcgtgttaaatctaaaataacaagcacacttttgtttgtattacactacacgctagattattgaccttctccttgactgtagacttatttctctgttatgcagagcaagtcaaaataatgcaataggcacagagaaagagccaactcccaagagaatacatgccctaaaaacgccacgctcatgaacctagaactcccaagaaacagccaggctacagccattttttccctgcagcagtaatccgcgatctgaaaacaggactcttgatctccattccctgcttatagaatgggctcatcgccgtcttaacatagctctcgtatacctcgttcatgaactggcgcacagcctcttcggtctgcggggaggtcgggtttgcggcgatagagctggaggaggcgcgtgtggtcgatccagctgtgcctagcagtgaggaggagccaatgctgccgcttgtgctggttgaagaggggagatgcgggggttggtggaggaggaggaagcgcgcgccacttggagtgaggaaagccgtgatgtaggctgctgccggcgggtaggtgtcgatatgcttcaggtaccttttgtgataatgtcaggtttggaggtttgatgtgggatggagcgcgggctgagggtggtttcctctgtgtttacatgcccctcgtggattcgaaccagttcccagtagccatttgacatatgggatagcttgttagacttacattccaccattggtccattgcgcttcttccaatatgtccagacttgagtggatgatgaactggttcatgtactgcgctgtctccggaaagcggaagcgagcaatgccatcaccaccccccttcgatgtgccaaaggcgatgttgaacaaaggtgtgtcagtgggtgatagaatggtgaagtagtaggacattttgagcagattgggattattcagggttgacatggacccaaacatggccgaggagctgaggattgcgggtttactagtggcccccatcacgtggtcgataagaaatgagctcgtccgggtgaaggatgtatacacttttgatgaaagttgaaagttgaagaatattgtaataatttgagttctgttcaactacatatgcagttcaaattcattcgcacggtctttaaaggatctttgggtgtgatcttgtttaaccaggattctcgttcattatatatctttgatcgttacctataactgaatttgatacgcgatttgtcgggcccattccagtccaattaagcaccgggcgtggcttgggacttaatatacaactttacctaggagatagtcaaaggaataaatcgaagtggccttttccgcttgacagatattagcataaaatatctatatcttcctgtctttggggcgaaagatttagccgcaaaccgtagaatacccgaggaacggggtaaagtcgatgaaatatccgcgatctgcgcttcaccagtgactatatatgattatcaccacatgtacttgcccctgagagctagccagccaccaggcagcatccgctcgtagcttctttttggactcagatactccgacctccagaacaatcgtgggccacctgtcatttcgacctggaggaagttgttcggggatccatgaaccatccggttctttggagcaaatgtttccttctacccttgcagttgtaagggaacatagcgttcttcccaaattcgcaaataatatagccctattgaattctgactggagctcacccacgatggcatcatgcggtctgcctggtatggtaacgatcatggcccgggtgtcggggttgtagagctggcggcatcccttggagagttttagatttgctacatctggtggtacattcgtgaacttggcgtatgctgtcaccagattcggggtacttcgcagacgagacagaatagaccgaatgctccgggctgatgatccgatcgcttccaccgcacattccacatcgaaacagtcaaagatcagttgtgtccatgatctttccgataagaggtgaagaaaaaatgatccatttcggtacgattcaaatcacactagccctggtaggtctcatggaagcttctggtaatcagtcaccaagtcctgcgtgagaaataaccagttagtcctatgagatggttattatgacatgcagttctccccgcaaaagccaccagcacgtgataaactgataactagccacggctttatcgcggccgatcacggtcgatcgcggtcgcaacctttgaccttggcaagcacttcctgccaaacataccagtttcgttgctatcaccccgggtacacaaagccctaaatctgcttgcaaaacttaagttccgatatgcccacaaatctcccctacggattgaaccttccgaacaaaagtctcgcggcgatgaaaccggggaatgctctcgcgcagaaaagaaagaacatttttgatgacgactctgaagatgaagaccagcaaactggcgatggtgcagttgaaatctcaacaattggaggactagaagagccagctacgaaaaagaaacctctgccaagcgcagggcctccgccgaaacgcaaaattcaattcggtagcggtcccaaaccaacagcaaaaccgctcagcaagaactcgctatttgcagacgatgaggatgaggacgaggaaaaaaaaagagagcaacaaggcgcaatgaatcttggattgaaccaggcgaagtcgaacaagccaaccgctcctgtccagaaatacaccaatctcgcgtccatgcacagtagcaacatgcaggcaaaagcggcagaagaaatcgacccactgatctactcatacgatgaagtatacgacagtttgcacgccaaacccgccaaggcctcagtggaaacaaagagcgaaacacccaagtacatgcagaacttgctacagagtgcagagatccggaaacgagatcaactgcgggctaaggatcgccagctagccagagagcgtgaagctgaaggtgatgagttcgaggacaaggagaaatttgtcacctctgcctacaaggcgcagcaagtggaactgcggaaggcagaggaagaggaagcacgccgtgaaaaggaagaggaagaacaacgcaaaaaaagtggcggctctggtatgataggattctaccgggacgttctgtcgcgaggagaagcacggcacgaggagctcattaaggctgcggaagaaactgctcgccgcgtcaaagcaggcgagatcatcggggagacagaggatcaagaggtcaagacggatgcccagaaagcgcaggatctcaattctcatggaactcgagttgttctgaatgatgagggccaagttgtcgacaagcgtcagctgttgtctgcaggactcaacgtggcaccgaaaccgaaatctcaagcacctgccgccaaatcaggagcttcaagacctaccgctggacgaccaagtgccggtgctggttaccagggtggccgtggtgcccagcgggctcgacagaccgacatggtcgcaacccagtacgaggagcgtgcgcgacaagaagaagaggccgaggctgcaaagcaaaaggagatcgccgaaaagagtcgcagtcgcaagaccgagaaagatgtgtccagcgctaaagagcggtatctggcaagaaagagagaacgagaagaggctgctgccaaggaaaaatccaagggggcttaagtgtatgcaaaaggcgggctggatgtgttgcatccatggaattttggaatatttaatattgcatagcgctgggggagaaacttgtacattactctcgtgataccaaaagagacccgactttgagccatagggctgtttgctatggacgaaccttgccgtagaatctagcttgggactataaatatgcttgcccctttccggacaaaatttttttttttcattcgcctcttgattttcattgctaacacttggtaagttctatcgccataactactctacactctcggaggaaccattgccaagacctcttaaccccggcttacattaccagcttacctcataactatcacatgaccccacacgggctgagttaatccggaccgaaagcactcgctaagccgccccacacaggtcgcactcccaattttgcactcccaaatcgagattcaagaatcgcttcatcaccaaaccacttccatctcccgtttatcaacgtcaatcatccaacatgggtaaggttcacggctctctcgcccgtgccggtaaggtcaaggctgccactcctaaggtgagttctcttcgatttccagccaacgacactcgatacacgatcgcagtggccatccatcccaccagcctttttaacgacgattttgcatccaggtcgagccccaggagaagaagaagaaccctaagggtcgcgcctacaagcgtattctttacacccgccgtttcgtcaacgttaccatgaccggtggcaagcgcaaggtacatatcgaatgactcaacccacacaaccaagcacaagacattctgcaaatatccacgaccacacaatacgaataccgtgaatggaggacagaaaggctgaccaggcgcaaaatgcagatgaaccccaaccccggccaatagattattcaagtcgttaaaacaatcacctgagccgcgatcggctagccgagttctacgatgaaaaccttcgcatgaccacggcacgaccacggcccaaacgaacgaaagcataccagatatggctggtacttgtacggatgatatcacgcttcttcgtcttcacttgaattttttttttgctggcaacggatgggtttttttggaggctgactcgcggaaatggatgaacacacatggtggtctgaggatggaaagctgtggctagatgtgagctgtctacgggcaatcctcgcagcctggacttcagagtcacttttcgactcatttcataggctgtcatgaattgcatttccgatccagaaatggactctacctctttttccatgcttttcgggttatctttacttgagacagtgtctaggggtatactgagagcttgcttttaatcagatgcctgcctctccagggccgatgttggaggtgtagaacaaatcaagtgggcccttcaatcgtggaacttgagcccctatgcagtttgtttcactgttcgttctgttggccaaccaacgacaatataaagcccacagtggctgtacaccgaagtatatatttgccgcaaacgtgtcagaactcactagtagtatataagtcaagttctcatcttgcctttgcaactttttgtcgcactatggggtcatgaaacgtgcgcgggctgatagaaattagtggagtcttaatttttactatagagaacgtcaaaagggcggagcacaaggatctagaattttatactatctacaagaatagtgggctcatgtctttgacaacgttggatttcgataatttgattcatttggcccaagacgaaatattagtcccaggtatgaaataacatcaatgcgagtgtcttattgaatgtcttcttggtgtctttctccccttttaggttataactagaagctaacctacagatcacgaaataattgcggtgaaaagctaaatttctatgcatcttgcgcatataatatgcatttgatatgacgagactggaaggaaatgttgggaaaagagggaaaacagataaaaacacactcagaaatcagaaaaattcagtttgagctgtttggatttcgtaggacagaacaaaaagccgtcactgaaaactatagaaggtagtttgtggtattgagaatataggcttagggtcttctgcaaggcacgcaggaacaatctcaaaggtccgatggtagtacctactaatgatagcggcatcctcatttagacctgggcttatgcctcggagctcgatgtcatgacataaatggcaggtgatcagacaaataggcatgacctcaccaaatcaatgccggatcatccggagatgatgacttcccaaacatgtttggtcgaatgattgaatattccacggatcgaaggacttctaaggtgtatttaaggttattggaggtaagatgactaaggtgatattggccagtcgctgactgcaatcctgaccaacacatccacttgagacaaatacaggacacaaagagcagatatccagacatgtctaatcgtcagacagtggagaaatgaatcgcttaagggccattgagttcaactggagtctctaccccacacattgccatgacatcgattgaactcaattccgagcccgtggccgattgggaaagattttacatattgtgatatggcaaggcacaaagcgatgaacgatgtcaagttagctaactgagtctacaggtattgaaccggaaattgcaaaataatgaagggttgctggctatccccatctcaactggagaatacaaaaacattagatacaaagagtgaatatctgcagtggacaccagctgttggaagatccacatattccaccttcttcctttggttaagcatcatcgacttctgatattatgctgtaccagatatcgatatccctattgctttttttggatcaagctgcgggccttggaatccaagcaaaggcatgggatggcccagctgaataccgagcaagctgttccctcatacgctcacttgtgcttggaacccactgctagatatgaacgccgtgtggatatcaccaaaataattccatgatgcaatgaagagaaggacggttgctaatattatttaggtccccccggggccctagttatagctcggtccattgttttatattccatttactattttcgaaagctgaacaaacacgactgaacgacaatacttgacttttatttttatttttactgtctacctattaataatttattgcaccaatttttgtcactcatcaacatgttcgccaaggccaagggaatcctcgataagagttcatccatccgtgatgaagttaacgaaggcaattaccatgccgccaaagacatcgtgaccaaaggtgaaaccaccaaagaatcgaccagccagggaaacaaggccaatgagatcgtcgataaaagctcatccgcccgcgatgaagtcaaccaaggcaattccaatggcgccaaggaagttctcacccaaggtcaaaacagcaaagaatcgtctggacggggagctgtcggcggggcatcaatcagtgctgctggaatgaacaatgaagaccttaacaaggggaatgttcaggagaccggaaagcaaggtaggaaaggacggatcggccaagacaacaccggtacctctactggcgaaacgaaggtggagcaacgagacattggcagcgagaagcaagaagttggccaggaacagcatgtcagcatcattacaaatgaagatactggctctaaacagcatggtcacagagacaatgtggcggccggagagcttgaacccaatgacgacatccgcaagggcccaatcacgatgccgggaaccttccaagaaaaggacttccacaatgcgaacggtaaagaaactatcgttcagagaggaaccaccagcgaagaaataccagacaacttttcttatgattccgcgggagcaggaagccaaaaaatgactggattagccgtcgctggaggtgaatctagcaaggaacctattgacaaagaggtccatgacaacgagaacatcagctcggacgtcctcaacgatgggaccactagcaaagacctcccaaagaaactcgtcgacgaaaatgttggaaaatatcatatcgacaaaaagcagcttgacaagcagggctctcagccttccgagaaggcagggacaagcgaagttgctgccaccgatgctgccggcgacggctatggtatgagcaagggagccgtcaaacagacctataccaccagaaagcagagcaagggacattccggctctagcaccaatgcagccacagcccaaggtcctatctccacaagctcaaagagtaacgttgcttctaccgtgggagaacatggccgtgcaagcggaaaaggggcggccgcctcaaaccagacgaacagcgggggttatacttatgcccgtgcggtatcaaatcaaggcttaactccgaaaaccccgacaagcacaggaaattccaccaccaatgaatccaaccaaacaagtggtctacgttctaccaccacgagccaaacaaataatgccttctacaatgccggcgccactggatcgaacaaagcaggcatcgtcggtggaggagttctaggacttcaccaagaaggtaattatggtatatccggcaatgacaacagcggagtcaatcaaggaagcattgctgcaggaggagggactcgccaggggggtgtctataatacctccggcaatgacagtttcagcaatagagtcacccacgccagctccggtaccaagagcagagccggaaatggggtgtcttcgaagcgcattgttacacagctgagtggttgtggctacaaactcactattcttcaagaaaaggttcaggctgtgtctcagaagtgcaagactcagctgggcctgtttcccagtgagatcagcaaacgcagccccaacgtagatgctttctttgatgccgtggcagctgaacgtctccgatggatgcctcatgatggtagcagactcgactgcagccttagatgggcgtctagactggcgtatgccgtcgacgctcttcgggagtccgtcggagtctttgcgcctgctgccaatgaggcggcaacgctcatctggggattctctgtcctccttttggaggttagtcaagttgaccggtgatatttattttagatatggatgctgactattgtacagtcagacatggacaatacggatgtcttcgagagcgtctttggccgatatggccgggtcgccgtcggtatatatttgcttttgcagtacgagattgcatacaaatcctcgcctgaacttcagccatatgttgccgcggtattcgcagatttgcttgaaatggtcagtagcacggctatgagctgtgtcgagggatttaaaagcaaagagtccgatcagattattggacgcaacgttgatgccgcctttttgacctacgccaagcgcttttctacccactggaattgtgttgtcgatgcccacactgcaaagctcgtggaggacagtcccttgatttactcttcgcctgagctgggtagcttgcgtcaattcctgggagtacaggaccgccctcttcagttcatcctcgactctcgcgctcactcgcttgctgagggatcgtttgagtggttcaacaacatgctctacgatttcagtgtcggaagctcacctgttatgctaatttccggtggtcctggctcgggaaagagtgcattagcccaatgggcggtcgaaagactacaggagtcgggtgaacacgatagctggaatgtgatcccctacaccattcgtgagttttacccttagatttttgctgatttgctagctaatctaatacaggtgctgatattcctgtcgctactttacctctacgcatcctgaagggtgtccttcaccagatgttggatcattctgtcagtgacaagcagacccaagaggctatcctggttgaagtcgcaagggcagcccaaggggcgatcgatggcgctggagatgacgcggtagaagcaagcctttggaagggtattcatgctggtcttgctacaaacatccagtacatgtttgtggttgacggcatcgaccagatcaggggtggtcataccaatgccattgcctgtcttgatcgcttctgtgagattctctccgaacagaatgctggatctaagatgattgctttcacccggcccctgagctcaaagaccgactccaaaggaattcagcagttttccatgcagacctcacagactaagagcgacctcatagcctatgtcgacaagatgcttgcatctagcgccaactttgacacacacaagggcaaccagcttcatgccgctgtgtctgccattgtagcccgctctcagggctctttcagttgggctgaaatggcggttgcatatgctaaacagcaaaagaccttgagccaggcggttgcctccattcagggcctgccgcagtcgatgccggagcttattgatttccactccaagagtcttgaccttagccagcagggtactattagtgttgtttcttggctcgcagcagctgagagacccttgctagtcgaggagattgagcatttgctgaacgtggatcccaagggccccagatactcctccaatcagccctctagtagctatgacatcttgaatgctctaagcccgctggttatgacccgtgatggtgtggtctctttctctcacacctgcattcgcgatcacatcatcaatcaggctaagtcgtctggtggggagtcccagctcagcatcaaggatgcacactacgacttgctcaccaggtgcctttcctgcgtccagttgagcgtgcgtgaggaggttgatatttccatggataggctgggtatcgaggagcgcaaccatcttttcgacaagtatgtcgtcttggagtacaccgcacgatactggctgtcacatcttctctcttcgccaattgtcaccgatgacgaagagttccaatttaattcaagattcaaaaagctcatgcctgccaccgttctgttcgcgcgcctcgagctgacttgccgcgagtcccaattcactcggtctagcgtcgtggagctgtacagacttgcgagtgacattcgacgattggtccttggcgagaaatcaatcgccctgctacaaagcctgattctcagcgcacgcgtgtccaagatggcgcatgccagccacgccgatgagacctgctacaaagcgtggaagctaagccaggagctcctcggccagtcacacccgattacaatggcatgctctgagatgatgatacagtcattctccgaacaaggcacgattgcctctcagcaggaagacatcctgaagtccttgatcttgacagattcggagatcacaggggttgaattcaatcaacgcctgaagtaccttggaatgatcgtcagcatgtacaagactcacgacgacaaccaatccgcgttgttcatctcaaagcacttctatcagcaagttcttcagaagtatggtaccaattcgcaccagtcatccgagacagcagatttcttgaccagtcagttctcgacaactggaagcgacgaggtgagccgtgacattgctagaaccaagtatgacaatatggtgcgcactatggaggtcactgacgagcgccgaatctcctacactcttcacatggccaagatgtatgaggaccagggtgaattggctcttgctcaggcagttctttcaagcctgtgggcgggtctcaactcacgcgacattgactcggttgatatgatggacaaaaagtctaatgtcgcccttgtgtactaccagttccttcgtcgtcaaggtcgaagtgatgaatctgaggtcataatccgtgaattggttgcagatctcgaggttactggtattcactccgaggagatgatgcagcgtgtgcaccttctccgcgctgagactcgggagatgcttatgtacaatctcgatcgctccttgtcaattcttatgtggcgctactacaaggagacccaccaagagtactcagaggaatcaaccgctctagcgctctcaattgctcagagcatggcaaatgcagtctctattgaggatgcatcctctctgtcttctcgggaccgcaagctgctaattgagctgctggacgtcatctcggccagtcccgacaatatgactgtcactaccttgatcctgtgccacaaccttgccagtatctatgtcagtgagggagattggacccaagctagtgaatgctcgatggcggttctgcggcatatctggcccaccattgaacagtccaaatctcaccagaagttctcgccagagcttgcaccccccgcggcagatttggctttggtgttggcctactgtcacttccgcaggctacatttagaacatgctgcagttatttatgagaatgcggtcggttctttgatctcttctgccggagttcccgtggcgtcggtgctagcagttgccaaggctgccgtcgagttccacgaaactacctatcagttcaacaaggcgctgaatttgctccatactatcagcaactacttggcagctcgtcttggagagaagcatgagcataccatcaacaatatgtatctcgaggctgctttggcaactcgtctggagaagaactccgaggccaagagcatctaccagcgaatcttcaaggctacttcccatcaggtcacgattgttcccgagggtatcgccgctgcaattgctctcatcagcctctacgataaagagatgcagtgggattctgctttgcatgtttaccgagctctttggccgaccctggttgttgaagacaacaaggcagattcctatgaccatgcgctagtggaccggatgttggagaagacttatttgggctatatgtctattttgaccaataaaagctccaacttctctgagcggtatcgggtggcctctgagtatgtaatgacctgtcgccacttacacggcgcaacaagtgagaagacgctcaatgccactttactccttgccgagctgtgtgagtcgagcgatgcacatgttgatcaagccatttcgctttacaagttgcctctggaaaccagcgagtgggtggctccttctcagtcatcgaaggggctagaccagatgacttcgtcgctgcctatcaccctcaagcacaagttggcacagctgtttgtgcgcaagcatgattcgactatagaagcccgttccctctacactgaagagtttcagctggccaagaagaatcagggctacttttccaccacgactctctcctggctccgtgaacttgccctcgcccattcgcgacaaggaacttcctcttctgtccagcagggtaacgccattctccacgcatactccaccgatgttttgcatgccgacggtgacactgacacagtgggtgactgggcccgccggatcgcaagtatctacctcgagtgcggattcattgaaggcggtaacaatctccttgacgaactccgccaccgcgtggtgtacagcttggaatcttcttccgcggtggatttgagcgatcgtcgcgatgccgtatttgttgctgccttcgaggaagtctttggcagacgtgccagctacgaccaaatcatgtctgagatggctcgtgagatgaagacctctagggacttctctaagagtctgtctggtcacgatttcattcccactttgatcattggccacaagctctacagtctccaggttggccagaagcgagttcgcgctgccaacgacaccaaggacaagttgtacgactacttctgctccaacctgtctgccaccaaggtggccgacaaggagatcgtgcagcagttctatcagatctgcctgcgtgaggtccacagagaaaactatagcatgaaaatcctcacaacgaccactaatctcgttcgtgacttgtgcaactcctcccgcttccaggaagctaccatattgacaggcgttttgcactccttcctgcatctgaccgatggtctcaacaaccaagaaagtatcaacaccgctattcagctctgcctgtacctgggcggccacaaggcaaccaagtgtaccgacgaaaagacctaccaagccatgtccatcaagtccaagctgctgctgcaagagatcatggcatcctcaaaatccatgggtatcgagatggtcgacctacccttcaaccaactcaacgacattatcacccttctaggccagcacgagatgttcgatgagctggaagccattctcacccaactctggacctcacgaatcgtccagcgtacctggacaccggatgtggtcgtgtggatcggccgacgtctagtcgaaacccgcttctgccgcggcaacgtcgagtccgccatccagttgtgccgcgacatctgctacaacctgcgccaggtgtggggcagctgcgacccggttacactgaacatgaccaagcttctttcagccctgttcacagcctcagagaaccaccagtctgcagcgactctacacgaaggaattctgtacgatctgctcagcgactccgaagcagagggccatgccaatgttgctgataccgcatcgcaacacatggagctactgcgccgtgcccaggcacgtctgggaccagactcaaaatcgaaccgggcttcggcgcatgcggaactgtcccaatcagttgccgatcgctttggtgtgcagtctgagcagatcaagaatgttggcgatgctaatggcggtgagcaattcggtgtttggtcgaagccgagacggtttagtatcgatgttgatgatatggaggaggagggccagacgcatcacaatcatctgcgtgagtccagcggtgttgggttgagtggtagtggcactcagagacgtatctcggtgcaggctctctaagtacactgggggatattttttttttatatcagatatttgtatttcagttcatgctggcgtttttggatgtttaacctgtaccaaattgtatacctttgtccgtttcaacatcacgatttggtaaatcacttgtctaactagttatcggcttcaataatctgactcttttagctcatcatatgtgatcatacaaaggttacactacactacagatgtatagtattgggatggcttaaatcggggcaatttctacgtagagtgggctggctactttatgaactggaggaaagatatttctaagtctaatacatcatctgcacaaggtacatacaatacccaagagtaataggtaattatgcttccaccacatcggtgattcgacacgcatagcagtttggttgataagaaatattgccaaaatgtacactgaccctgccggtctgtgtaggaccacaccgtgatgatgttgaatgaatgtagtttaaacccgaaacccaatatgtgtgttcatgcacgctagcacaaggaaaacaaaggatcatatgcctagtgtatgatgcaaatgatcaccagagccgaagcctggtcaagcggtcaatgcaaagctgaggcccatcaaccccatgcctccgacagcgaacccgatacccattccgcggtgatgggtgagcccaagtccctcgctgaaaagttgcaacgcaaccgaagtcatgactccggcggtgacggcaaacatacctccatatataccccacgagggaccagtggcatcgtcgctaccgcgttgcccagtgctccagatccagagcgctgcgagtccagcaccggctggttgactgatacctcctaggagactagaccagaacattgctctccagcgggaattgagggctagatagagcggaagtgacatggcgaagccctccacaatgttgtggataactagagccagaaatactgtcataccgagggttgggctggcgtggtttgtggcgtaagtaatgaacccctctggaagcttatgtagagcaatggcgagtgaggtttgaagcccaatggaaaggaatgcatttttaggaacgtgatggtggtgggggttgccgccggcagatttgggacgcccagaatcaatatcgtccaggtagctatgagattcgtcatggtgatgatgctcagaatgcggacgagatcgatgacttaaatgtgggtctaaaatgggagacgaagtggacgatcggtgcatgtcatgctgtacagagatgttgtcaaaatctctcccttccggagtgggaggcacatgttcaatgtcgtcaattcctacgcgagaaatttccgattccagcggcacggatataccttcacaatgcagcaagtttggtcgcgcgctctcatcgctgttgggtggtggaagcactttgttgcattcgaggccacaggtttgagaaaccccgaagcaaggcccgtcctcgtcacaggcggattttacgccacccatgaacgacgtaatgcggcgcgctagcattgcccgcatcgtgtcgcggcgtctgggtgccggctcgatgtgttggctcgcttgtactaccgctggcgttgacttgaatgaagatggcttattatgttgcaacaacggtgttcgttcggtatgtccatttgtatcgttgtggacatggtcctcgtgtgcggcctcgccgcgctcggcatcattttctgactcgtcatgggtatgggcacagtcgacaacatgagatgggatgtaacgatgtgcgaacgcggatagtatttgaatgccggccactccagcaatgaaaagaccgatcaacatatatgcagatacagcgggagagaagccggcgcgggtaaggtactgcttggatgtgggaagcatgctgtagagggaggtaaagagctgcctaggattaatatagttcactattcctccagaataatgcttaccatgactccagcactgagacataatgatgccgacaggaaatgactactgttggcgatctggaagctcttgcggcgggagaccacttgaaccagcacatcgacgcagatgatagaggaaccaaggacgcatgctgaagatagttagtggctaatatttcaaagactccaggcgacacttaccgacgcctgagacggtgctcatcacccatccccgaaggtcgttggcagacatggcgtggggagttgaagaaaacggaaacggtgatgtaattagcaatcagcgtggttggcggtcaagactttgcctctcttcctcactctagaggaatgaaaatatgacgatattcatgatgggcatttatgttaatcacttgcgttgtctgaggacagtgcattccgtccccaaggttctcactgcacctctgcaagcccccctcatggctgggatctgcgatatcgaacaaacgatctggcatcgtgaacgtccagtttgagagtccctaggactatgggatatggaggaatatttcctatctgagggtcatagatactgcctttcattgcaatctgtcctgtgatacttgacactttctcatatgaaggtgcacacctggacatatgcaggggattatgcaactgacagtatctggtgatttgaaataactttagactcaccggactcaagagaatgacaagtatcacgagaggcaagagaacccagagaacccaggaaatccagagaatatatatacgacatctcccatgccttggaaatgacaatagttccgggccccatgtgatgtgattggcccgtgactccccatcttttttgctgtcttcgtgtttcggctctctcgacgctctagcctctcagctctacctaggtaaatccaaggggcactcagccatgtccaaagcaaccctggccgtcatcgctgccgccagcgcagctaccggagctggtgtcaccgcgctgctcttctccggcaaatcctcgaagccccaacaacaagagaccctctctccgacaccgacaaacccgggcctcaaggtaccctcaaccatccaggccccagccctggcatccaagcgagccatcggccccgtcgacccagcaggaatcctccagtatggtttcccgggcccaatcgccgacgagctctcttccctcccattgcacggcgcctacgaccgacgcacacgcaacccatcttgggtcgcggaacacatcacgccagaatccctagggattaacaacgccgacagaaagaagagtaccttcttcgaggacacgaccatcccggggatgttccgcgctaagctgtccgactatttccgctcgggctatgaccgtggacaccaggtgccggccgcagacgcgaagtggtcacaggaggcaatggacggcacgttcgcactgagcaatatgtgtccgcaggtcggcgagggcttcaaccgcgactactgggcgcattttgagactttctgccgtgatctcgccaagcgttatccctctgttcgcatcgttactggccccctgtacctgcctcaccgtgacccggatggaaagtggcgcgttaactacgaggttatcggcaacccgcctaacgtcgctgtgcccacacacttctataaggttatctacgccgaggatggcaccaactcgcccacgagcaaggttgcactcggtgcttttgtcctgcctaatgctcgcattgcaaatgataagcgtctgactgactttgaggttcctctcgaggctgttgagcgtgcttccggtttggagttcggctctaagttggacctcagtcgtcgtcgccgcttgtgtcaagaggtggcttgctcgatcactgtgcgcgagttcaacaatgctaagaagcgttcttgagcttgatgtcacagaaatgtgaggagagagaccaggcttgccttttgacttctcgtatggcttcactgtattctagaaacattgtatttgcataattcgggcgttaataaccgctccgggcggcaatataaggatctttctttatcgtacacataatggaaacctgtgatgtttcatgtttctttctcgcttccttttattacgaagttgttcagcactggaacgcaaccccggtcttcttccccatgctcccacctttgctagcaaacccagtcccctcggaggagatctccaccagaccaggctgaatagcatccctatcctttttcttagacttcttgttattcccattcccgtgatctggttgtgacttcgccgtaagatctgtctcacagacgaaacataaaacctgaccatggagagctgcagtcttctcctgctcctctttcgaggcatgtggatcagggatgtggtgttcgtggggggtcatgaatttcgttacacacggagagcaaatgacatgcccgcagggctttgtgactgtcatgagacataattagcaaaacccaatggctgtaccaacttctactccacatacgcatcgctttgagcccattgcttaaatttttcgtgcaactcggacacaccctagacacagtcccatcggaagccttctcctccgtgaaattaacctcaacaagcgacttgagcgagtagctatgtcggctctcatccgtcgagccaggacagacaggcgtcaacttgacggtcttgttggcggtgatttcattcgcatcagtgttgggtgttaaagatggaacccagaaagacgggagagcagatttgctagccgactagagcaaatttgttagttcaaaacaaatctccaatcgaagaccgaggcttcaagcttcaagctccagcccaaagaatgaccacaaaccttctccatcttcaactccatcctcaacctctccttctcctccccagcaacacgagccatctcctcctccccgagctcaaaaaccctcttcctcttcccatcaacctcaacctccctagccttgaacttctccaaagcctcagactcctccgccttgcgcttcttcccacctttattctctaaacccatggaaacaagctcgaaatccctgagatctctctccttcatctccgccagcgagcgctcctcatcctctgcgatgcgttttctcgcctcgtcgcgctctttttcaagccgcttgatctcctgccgttgagagaggaggtcgttgatcgcacattcgcggcagaagaggtcgccgttactggcgcatgcgactacaggcgcccgcgcgggttgcagacatagacggcaggagccaaagcttaggaagctgtcgcggccgattgcgctgcgttttgtgccccaggttgagcgtagaagaccgcgttcgtaggaggtaaagtgtgggagggaggtgtttcgctttgaatgcgccattttgagtgtggatcgcgtggacgttgatcgggggtgagggtggctttttgtagcttcttggatggcgtaatacgcttttactcggggttcggcggcggtggggcttgggattggtgtgttggttcaccgctcagcttaccgctctcatcagccctatgcaacatcgtcggactccactacattgtgtatctaagcttgcacagacactgttgaaagcaaaatatcaaataatcattgtcaatcgtaattcgcttttgtctatcggtgattccacagcctcactcgaaagaagcatgattgaaatgaaatagccaagccatgagatatcaaagcacgcccatgaatgcagcctgccatacagatctgattcaacgatctgacagtaaatgaaaaattcccagaagcctaaacgtagacgcggacgcagaaatatgctcaaaaaccagaccgaaccgaaagcctgccacgaaaccgagattcaccatatgttaatgcaaggacagtaaggaaagtcaattaggaaaaggcaaagtgagatgcatgagtttgaaaaggggtataataatcgtcaagcagaagatcaagatgagaatggtcaggatatacagaagaaaggagaaaaagataggaggcgtagagtcaggcgcctacggcctgctcgcgtatgttttcgctggacgggctatcaatgattcgctcattgatagatgtagaggagggggagggggagggggagccgtcatgtcttggtgcggaaagatggccgtatattgtggatgaaggagagcaatgagtatgttcggtgtctaggggatctggggtcgggaacgaggtgatcaccggggaagccgggctcccaaagtcctcttccggttgctcttccggttgctcgtccggttgctcttcatgcgcatccttgaactccgccagatcgtcgctggtacgcccacttaggccagtggcgttgctcgtcctgcgcgccgaatgacgttcggggctgcggtcggtcataatcgactcgccgtccaatatagcaggatccgacgcccgtggctcttcatgaggggtgggcttgcggagcttgaggcgctcctccgggggcatgttttgccattcagacccgaatgtgacgacggatgctttcttgccatgcacggtgaaactaggggctttgcgaggaaggacttctccatcgccggacaattgatcgtcctcctcctgtccaatgctagacactgaaccccgtttcttcttcgaatgagaatggtttctatgagcatgcgaatcacggagggtgcgatgaaggctgcgacggacacgactcggtcgatcgctcttgtcgtgtggatgtgtctcgccctcggtgtctttaccgggaagtgcgtcaggggcgatctcttcattcttatgtgccgacggggacgccggcagctccagaagaccagcttctcttagaacacgctcctcgccgtcatcaaagcccacaggggatgtcagtttcgatgtacgagaagccagactagctccatcccaccggctggcacggctgaggagcgaggcttcacgctcgagtttaatggtcgatggatcgggggagtatgacttggcacgttcgggtacagccacagcagagcgccgacgcccgacacgggcaatgtcagctgaagtggcagatcctgggatactgggacgacgcagttcgtcattcgaaggtttagccagcagtccagcctccgagggctgctcggtttgtgccacatgaggctcggggacatcggcgctagagacgttttgcacaatactaccggctctttccacgctaggctcagatgtcacggacggcccggaaggagaggccaggcgtgctccgtccgactgggattgcgtcggttcagagaccgacccgaccctactttcctctgtctcttcatcctctcctaagtctcgcagaagaacctggcggtaacatttgctacgccagatatcctgtctcacccatttgatcttggcagacaggcggcctgcagccatgatgacgccctcacgggcccgagcgtgaagaggagtgagcacttgcaagtgtcgggcattttgtaaaagatcatccagttgcttttgtgacacggcgagcttttcgtttctttcccggattttttggctcatcaattggcgccgcgcagcaacaaattcggcaacaacgtcagtatcgatgctaggagaagggggctctatgtccgtcgactgttgagacttttgtgaagatatcgagcgtaatcgctgactcttgcggtatcgctgcccctcataattcgtggcgatcatgcccgtggtgcgcacaccagtggtcctgaaggctgccgcgtagttgaggtgtgcaagccagtcattcatctcaggctcagagctggcaaggaatatctcctccaacgcgttgtgtcgaacaaagataaaggcatgcttatgctttttataacttgagtctaggagggcaactgtgtcaccagtagacacaatgttgtccggcttgaattcagcaaggggcgggttgaagacaagagtcccttgacggccattcttaacatatgcctcctgctgtgccatgagtgagcgcacccagttcacattgcggaagaagtagagttgagagaaggtgagaatgaccccccattcctgccagggcgacctggcctttttcttctttgggtgtttccgccaaagcaagccgaccttggcgaccttgatatctaccagaccgggatttgagtcgcgtgggctatctaagctagccggcatgaacgcgtcaggacgagagcgcagagaaataatctgcaagattccagacttggtgaaggcctggtgaagagcatctatgtcgggtgggccagcggttccaaaatgattgtatgtatcatccagatccatgacatccttcaagctgggccgcagagatcctaatttaccttccaggataagtgagtaggggtcgacaggttcccgtgcaatgcgggccaaattttcggagctagttgttttgaacagagtgcgacgtggtttcgccaagtgtcgatcagggagattggcgtcttcgacgcgaatgaacggagtgtatgagatattctcatagaaacactcaagaatatcgtctgatattccttcactgcgacttatcttgacataatccgccttctgcatcttccgtttgttgttcttattaaagacatccgtgtgaagaatcaaaagcgagaatgcaataaagtatgcgttatccggggatgtgaagatgccaggattacattcgtgatagcgatcagcaaaggcttgcacgaaacgatcaatctgctgtgtttctttcggaagctcgacttccatcaaaagtttgcggattgccatgtcgagtgggtcaccgaagtatgagaaggttctcatatgttttcggagacacaccttgtagaattcctcgtctgattgagcgaggacacccgcaatcatgccccggggcagagtttcttctaaacgtgtcagatatgaagcgggtgtgtcgttttcttcccgttttgggattgctagctcttgctttacgggggtggaggcaccacctatcgtgggcgaaccatgatgaggagaaggtggtgatgagttttgcctcaatcgctgcgtgatattaaagatgtcaccgaaactcttgcggccactggtcgaagtggacgtgcgcgccgaagatgccaaatatggaggtatggacaagtcgtcttggttctcggccagcgatcccatggtagacgaacgtccccggttcttaaaagaggggttagaccgaactgagcgagcggaattcgtcgaatcatttcgaaatagcggtggtacatttgaggaggcaacgaatcccacggtggaacgagctggcgaaggtagtggtgaaacttggtcctggccatctgaaggctcggattttggggtatctgctggggggaactttggtcgaccatccacacctccggccggctgcgagactttggggggtaaaggaaagagaggagtccgggatcgtgtcaagcgtggcatacggaatcgctttgcggtagtgacgggttgaacatcacgaggggaaatgcttggggtgactgtctggtcaccgtagctctggtctgatcgagacgattcggaaaaccggggatcgatcaccgacgagcgctgggagtcgttgggctgtgtggtcccgccccgtgagttggttgacaagcgccctggctcttctgtaatgctctgggacatggcaagcgtcgagtcggtaacctgggagtcggttgatccttgacctcttctacgaggcttcgcaggttgttccattgatttccgagacatttcctccatggactgttttcttgacgacggtcgaaagctgagcttgggtctctgtttcaccggttggtcgagctcgtgactagtcggggcggtagtgataattttaggagctttattcggtagacatagttaatcaattgatcctgatgagcattgagttgtgcatgttttcactcacgaggtagggaagggaccgggggagtttcctcgcccgctttggcgtaagacttggagagctggggatcagaagcatggcgtagtctcatgaagctgaatcgcttgtggcgtaagttgggacggtcccccgaggatggtcctgcaaagtccgactgagatacctcatgggtcgacccgttctcgtccggtacctgcagtcctggatctacttcttctgacaagccgggcgagcgaggaattgactcggatagtctaggttcggcgggggggtagggacgaggaaggtgttcactgcgacgggataggccttgaggatccatggtgctctgcctcttgccatcggccacaagacgcagtcctttccaatgcatggtgaagggcagagcgtgaggacaaacccaagctaataatccatggaatgtaatatgttagatggggaattgaaatagaaacggaggacattgcccaggtggatccagacgcggtggaggtccctcgcaaaaaggggaatgccggaaagggaaacgttctagatttcttgtttctgcccgccacgcgtattttccttttccttttcctttttttggatcttcgcacaaaaatagatagaatcaaaaattagaagaagagagagaaaaaaaatagaggggcaaggcagacgagttagaatctaggcctgagcgtcgggtaattgaccgggtttaagtatagagatggacggcgtagaagatagaaggttgccgttgacgtttattcagggttgttagcttctatttaaatcgtacagatcagatagattaaaggatctttaattagtagtcgaatcattctattcctatggggtatagttggagtacattaggtactaataccaagtcctgctatcactaaaagtgccactgacgtagaacacaaatatcgcgaggcctttcttctttttctccggatgtctatgggccagagaatttcttgctttgcattctattccaactgcttttgatgcattgaacttggactatatctgccatcgttatctcccccaacgctttttccccgccctcttctctcttctccgcatccaggctctcacagatatccctgtgaacctcaggtctgacttgggaccaccaactccccttcctccactggttcttgcgactcggcatgcgtcttttatctcccatattggtcgcgtcgaccttgcttcctcttatctccgctgtccccgctggttcaagcatcaccccaccgccacccctgctgccttcccacctcactcaatccaacccacgcccatgggctcgactccgtgactgggtaattggctcaatatgggatattgatcacaaacggtgcccttcaaaatactcgtcaccaccgtcagatattcacgatcggtatggcagtgatgtcgtcctccgctttcatctgcgccagccagacgaggcagaagcattggctgccgcctcgcaggtgctgttcttggatatttgggcaataacctccaagttcgtagatattagacttgcagatgatatggtgaacttttcttctgaccgatttatgattgtttcgctaattattttgttagatcccttccttgttggacatactacctttaacactccgcacctcctacactcccctcatcgacaacctcgccgacgagatatacgcctcttacccctcccgccaccgtaccgactcagacttcagttcaggaattgcatcgggtgaactgaagacgatatcgaacggcgacctattcttccaagaataccagccgctctccgtcattacgcagtggatgcgcttgatggcatcgatgttctccacgcacgtacgtatggctagcgtgggcctcagctacgagggtcgcgatattccagcattgcgactcggcgcttctcccgacacagaagccacatcgggccctcgcaaaacaatcgttatcgtcggcggttctcatgccagggaatggatcagtacctccacggtaacatatgtcgcatacagcctcatcactcattacggctattcacccgcagtaacacggctgctacacgagtacgactggatattaatcccaaccctcaatcccgacggatacgtgtattcatgggagtcagaccgtctatggcgtaagaaccgccagccaacggggcttccactgtgccctggcgttgatctagaccgcgcctgggactatgagtgggacggcgagtcgactcgctcgaacccatgttcagaaaactacgccggagcggagcctttcgaagcacttgaatctcaccgcttggcgcagtgggctcagaacgagacggcgcatggccgtgctgagatcgtaggcttcgtcgacttacactcctactcccagcagattctatacccttactcgtactcctgctcatccgtgccccccaccctcgagactctcgaggagctagcgttgggtctagccaaggcaatccgccagacctcccatgaatcatatgacgttacttcagcgtgcgagggaattctcagtcaaggtacggctgctgggattacctcgggtggcagcgcattggattggttctaccataagctgcacgccacgttctcgtaccagatcaaactccgcgaccgtggtagttacggattccttttgccttcggagcacattgttccaacgggcaaggagatattccatgctatgttgacattcggcaagtttctccgaggcgacgaagcgtcggatatcagctttgaggacttgatggcggatcaaatacctataggcgacagcctgtaaggttttttttcttttgatgattgcatgttgactttacgagcggatcttccccttcaacctctgtacttctggtgttgcagagtctttgtacagtatgtaggctatttgagcctaagaatgtaaagaattcgaaacattcctcaatgtaccggtaggcttggatgtgacatgattctaagaaaacaaccactgtatccgaacttccatactaagcaaggtttcaaggatttatgtatcctatcaataagcaggaatcttacgggagcttccaaatgaaaaagaatatatagtttttcgttgctatcctcacagaatatgcgcccagagttacgactaaagtggactagttccagctaagaaaaatcttggcctaaaaaaggtgctcgcggtcataggtcacttttttttactagaggatgctagccctctatattaattcgtacatacatatcaatatactattgatggctacgtttcttgaaccaagggtaaaaggataatagaccgaaaattatctctcataatcaaaatatatgaaggtaaagcaagatattaaaggtctgtcgatgtggaagatgacgggacaaatcgtgctcaagtcccacagcaacaagatatgtgggtaggacgcgcatcagaaaagccaagacacgaatttcttatagaaccagcttgcgtcgttgttcctctctgcctcggcctccttcgcggcgagatacaacgcctcttcgcgatcaatctcgtctttgccagtaaagagatcggctgtcatggggtcaacacctttggagccggtcgcgaacttgtatccgaagatcataatgaggtatagagggataccgaggtaggcggtaatgaagttcttgtaatcgaagtctccatatgttttggggttgtggatgaagacgtcgaagttcttagtgaaagcgatgaggatgcagaatcccagagcaaagtatgagcctgcgatgcccaagggcgccttgtaggccaaactttcctcagggatgccctgggctttgcgtgcacgcacgaagtagatgtgagtgaccaggatggagatccatgtgaggagaccgaagatggtgacaaggttcacgaagtacttgaacacagtcctggagtcgctgctaacgttcatgtagcccagcaaggcaatcacagatgagatagccagtgcaggcacggggacgccacggcggtcggtgcgggcgaagatcttgggggccttgccttcgcgggccaggccatagatcgtacgggtggcgatgtacaaatccgagttggctgctgagaagacaaagagcagaatacaagcgttcaggatgtggggcaggattgggatggcggccagctcgatggcgaccacaaaaggtgaagctgcagctgagccctttgccttgttatcgtctgaaagggcgaagaggaggctcggggagttgtacggaactagtgtgccgacgagaagcacactcgtcacgtagaacaccaggattcggtagaaggtcaatttgatcgcgcgagggatcgtcttgcgggggttttgtgcctctcctaccgtcactccgactagctcagtaccgaggtaggcgaatgtagcggacaccatcgtggaccagaaagccaagaaccgaccaggtgctccatccatcttataggtgttgaaagcacccgggctcttccagtagcggaagcccttacggtcatggtccggtccaccaccaagcatgagaataaaggataggaggatgatgccgaggataacaatgaccttgaatgaggaaagccagaactcaaattcaccgaagaatttcacaccgaaataattgatggcaacgacaattaccaggaagatggtgatccatactccagcgttcacctgctctgtgggtatccagaatgatataaccaatgcaccggcagtcatttgatttggtgatagaatgatatatttgaaccagtatctagattcgggtttcgtgttagcgagattaatttttataggaatgagtagtacatacgtccaaccgagggtgaagccaagcgcagggtcaacaaatcggacagcgtaaccagtgaaaccagagggcaatggcagccaagccgccatctccccaagagcacacatgaccaggaaaacgatgaaaccaacccaagcataagaaataagaattgcaccgggctattcaagtcagcaagaaggttcgggggtcaatttcggtttcaacactcacgccagccctgtacgacatctggttagccttggatctcagaacaaaatgggtagggaaaacaatcacttactttgcaagagcttcaccggttccgatgatcaagcccgtaccaatagcaccaccgatggctgtttactgtcaacgaatgctcgtgtccgactcagaacgacacccaccaatcatagtaatatgtctcgccttaagcgcacgatgcagctcaacatggttgggatcgttcaggccactctgaccaccttgctcaatcttgatatcctcactgatctcccttgtgagggtattgtccggatattcatcgactttggtagacttctccattgtggattcgacgcgcagaggtttgcgctgacgaggaaaaatgcccgggtaagaggtaagagtaatcccagatgtaagaccaggaagacagggggggaggaggaattaaatggaaagccaagagtagaaagtacacagccctggagaaagataagcaagagtaaaaagcaagttactgcttagttagtgacaggaaacacaaataataagatacgagacccgagaagacctcgggattaagatagccaagggtttttgtggctttacggggtaagatattaatttacccaaacacctcatatcacctgcacagttcattccggtgatctgatagtttggccattttcgggttccggggagtactggcacaatacggctgtgcgcatgacgtagcgctgtgctgttgatctagtatatgtatagattacttcccctgtatcgaatatgtcttccgtcagtaaactccgtatactataccagatattgttccaaaaggaacacccgggcaaagcggagaccttggcgtcaagacgggatactataggctctgcgggggcgcgctttgcggcggcattcgtcggaaatttttaggttgccccattccccccgttcccccgggttttgatatgaagcttcttgtttacacttagtattcaatataagtatgagaataacacatgttcaactgtatttacagagttgatgtcgatccaaaagcaaagagagtaagctccctcgaggccagacccggccatatttttgactcagccacccgattgatagcctcattttacgacaagggcccttatcaagcgcaaacccgaacggactgtacagccatccattgccaaggcggaattccattttcgtccatgaaaactaaactcgacctgggtgagatgcacgttcttgagcctgggcatctgcgccaaggccatttgcgtatggttcagccaatccttatctctcttggccagtgccccgtggcccggtcttaaatttatggcgggattttttggtgaaggtagatgcggaatatttctagaaagattctggattgtggcgggggcctggtggaataatttacccggtggctttggcgtcgaggctgcgcaacacaaagcaaatatgagggggtggggtgccacagcatggagttttctaaccctatctacaaaggatatctcgtacaacatacataatccatagtttcgctggatatgtccatcttcttggcttcttcgattctttgttcggggtatgtgtcaacaaattgtaatactgcttatctcgtgcttgttcctgctgtaacagtggagatgcccagcctagatagcaaatgtttcaatcccgtcacctttttatactttctcatgtaccagtaaatgctcaaatgcgcatcgctctgagacaaggtctgacagaggagagaaacaccaaggctagtatcgaagttggaacggtgttaggaagaaagcctgggacagctccccttgctggatttctggcatcgcaatgtgaacaaatcgaagaatataggaaattggcgagtcatcgttgatggatgtctgaagtccacataagacattctcgctttctggtgtggatttggctgtgacgagcattctcttgatctcacgaggccttgaagatacatggctggtctttcagctcagtgagcaatccaaaggaccaaggttttgggacaaatggtcatagagatggtgtcccaagtctgcaatgtgaggtcccagagatacaggatcttaagtaaaaagccatgacgtggaagtaaaccgtatagggatgtggttgatagcctagacgaagaaagaatacaaaggtattcagattccagaattgaacgaatagtaagagtgtaaaaaatgttgagcggtgtgatacattagctagtataaaatgggaaactgacaatatataatcgagtcggggcctacccagggatccagataatgcgaaagatttcagtaaacagaaaatcgcgcttgctaatattccatccggggtaatcaagcaaatcaagctcaattcaggtaatggtgattgatctagagcatgcatagctgacgtggaagacgatggcccataactagccaacacatccacagcccaatcatgcaatagtcgaggtcacaccgacccaggaaaggaggctctttgtggcaatcgggcaggattcagcctcatgaaaatacccgaagacaggaagctaccggttagatcggttatccattcgtccagaatcaagaatcacagatgtaggttgcaacccacagcgcttcaatgcattactagtgacgtggctttggagaagcggaattttgtttcctcgtaaagaaccacatttgagggggtgtgtggccaatatgcaggtctagcctagttgggttgagggaagaataccacgcacatgtgaaattcagccgctttgttccctagtaggagtgaccttggagcggttggacttgaccgagtggattgctcgtattttttcaactacaacgtaggtggcaccaccgaataatggcgacccctgtggttagacagggtacagttcatgctgtacgatgtgattgaggagaactgagccagtcaatatctcatcatatccgctgttacttcaaaactactgcaagccaccgtttaccaaagtccctgcaaacacgcctgaagctagcagctggggatattctcagcctgtcgatcaaaggcaacgttaccaacagcctgggtgttgggaatgtgatcaagtcattccggtgggggccatttggtctgcaaatctaattccttgaaagtgtgctgtggcgtgcataagtccgttagggcagtggtcgttcattgggtggtgaacgcctcagcggttacagatatttatatttttttatcgtgctgatcggacgattttgattcgtcgaaggaaagtggaatttactatcattagaaatactgaatagtagttaatttgacggttttccatgttaagacttgaagagatgcggggggaattgattccttctcctgagctggtccctatatcagggtctggcagccgagcatctggattcttcaacttccagatcttcaaccaaagaaagttcttaaattccttgtcaatcacatcatgggtgccatgcgtctcccccgcccaatgggcatctatgtccccagttcaccaagaaccctcaccggcgacatgatctctccaccactctctccagaattcagcttcgattccgagactgtcacaccctctctaatcccagctctggaatacatctctgccaaactacaacaaagattgatgcacgtcaccctcctcatcggccgcggaaagccctacccgaccggtcaagcctccgacttgatgatcatcccaatccattcaatcgagccacaagcatggcgagtacttgaacgcgccattgccaaaggctcgaggaagttctcactcggccctagctggaccgacgccctcagccgcagccagtatgagcgccaggctaacgatcacctcgtcaagcaatccattctgcagaacgaagtcatcttcagtcaggagggcctaactctcctaaacatggaccgcatctataccttcaagcgccgtatgtgcattctctctactcgaccgttctcctgcaacggcggacagtcaatgtcatcctgcgttcggctactccaccgcatcgtcgcagatttcgccggtcgccccttcagcaaggctttcttctaccgcgtctatgagcagctcgatgtcccagacgagcagctcactgccgtcgcagttgcttataaaaacgtccacaaccaagatgcaatcattcttcccgtccaggcaaaagctcctgctcctgcccttactactgcttctactgctcctagtactgctgctgctcttgtttctgttccggttcctgcttctgtttctgctccagttcaggccaaagtcgaggccactattccagcgaaagttacagcgaaggtccagcccaaagtgcaggcagaagttcaagcaaaagctcagctaaaagctgccgagcgagtcatcttgaaacccaagaccgaccctatccctatccgggtaagagccgaacgtccccgtgaagtcaaaagatcgcccatccagactgtgcgcggtcggagacagcctccatcgtcgaggatgcgagggcacaataagcgtggacctaagacgcctctttctgcgtcggatgttactcccatcacgcggaatgagtggaatattcttgtcagccaggatattcgtgtgcagcctaaggttacacagtggactccgtcgccgaatgtcttggccgctgcttgaaccggatttccagttctgttggtgcacagaacaattcgctgttagatccatgataaaccgccagaccgttgggtctcactcacggctcacatgccatcccccaggcgtattggggcttgcttgaggtggaatatagatacatatacgagaaccaaatctagcccatggtgctgggtcatctctgtgtcttccccatacctgattccaccgatactggacctttataggccattttggtggaggacagattggccagtcttgacataccgggcacaaaaacgagttcaggactggcgctgaaaattgctcggtaccctacgatgatatgataatgatttcgaacattttcaaacgcttttaatgacggattggagtcttgaatattgaaaatcaattcacagtgtacggagtatatagttctctttttggaagacatacaaaacttttaatgaaatcgggcaatatcccaaatacatattcaagtagaattatgaccatccaagaatctcaaaaataatcaaatcatacaccttattagatgctgtgatgaatcggcatcctccgggctagtttgtcgagcagccagcatggccccgcttaagctcggcgaccggcgaactgagacagctacccacccaatcacaggcacgggaaaagatttacagtggatgtcaaacaccaaaattcaagtattgaagctattagcacatgggaatgcaagctgtgaataatccaagacatttcctatcggcggaactcgccgctattgtactatagcacacaacactgttggcgttttggatgggattgtagacattcatactgaaatcctgagcactccgggattcgcgcagatcttgcagaatcctacatgtacacatacacgaaggggaggttgtctgaaagatgtcggcttggcggaatcgggcttggcggggttatctaaagtttaagcgcgggcatatagccctggaggaacccctcttcggtgtttccaacgtcaattgaagcttttggatatctctccaagagacattgtagacatcgtgacagaaatttagtctgatatccaccatgtcggaattcaatgagcccgcagatacagactcacgcagtctagacagcgaccgcaaatggagtctgcagcctcttcttcgaagtgccgagcgctcgcatagcaaaatgccgggcattaggaagattcctcttcccgccattggaattattgcatttattgcgttgttgaatatcatagtctggattgcggcagctattgtgctggtaagttcgaataggttgtttgacattggatggatttgctaatgctttctagagttaccatccgtgagtcttcattactggatgtcccatagctcaaatctcatttcatttactaattgagcggaatacagttcgctggtttctacagctgccctagcctattcgcttggattaagacatgcattcgatgcagaccacatatcggtatgtcgaagtcggcctggaaatagaccgaatgattaacagtgagatctataggctatcgatttgatgaccagaagactcctggcaacaggacaaaagcccgttaccgtgggcacgttcttctcgcttggtcactcaacgtgagtacagtcacctcattctatatcaaatcaaacctgacccagtctagcatcgtgattatcacatcagttgtcgtcgcagccacagcagcagctgtctccgaccgcttcgacggcttcagcacggtcggtggaatcattggcacctccgtcagcgctgccttcctgatcctgcttggtcttatgaatgcgtatatcctgtataaactcgtgaagcagatgcaaaaggtcttcggtctccccgagggccatgaagatgaagcgtggaagatcgagggtggtggaatccttttctcggttttgaagaaaatgttcaagctgattgatcggtatgttttttggtcaagctgttgatgctccgcattatctgacaaatgtgtctattttttgtctagtccgtggaagatgtatcccctcgggattcttttcggtcttggcttcgacacctcctccgagatcgctctacttggaatctcatccatcgaagccgcgaagggaacatccttctgggtgattctcattctaccggctttattcacaggtcagtaccctcacatgcaagctcatcaatcccctgcttcagctctaaccaatgtctcccagccggtatgtgtcttctcgacacaattgacggagccttgatgttcgccctctacatccaaccagcgaccaacttcctccctcaaaagccaacaagcactgtctcagacacctcatcaatagctaccgatccagaccagctcccgcaatcacataacaaccaccgcgacccagtcgcattcctgtactactcaatcgtgctaaccacactcactgtcatcgtggcgattgtgattggcgtgatccagctgctcagtctcatcttgaatgttacagacgccaaaggcaaattctgggacggcgtccaggtcgctggtgactactatgatgctattggcggtggtatctgcggttgctttattgtctttggtctgttgagcgttctagtttataaaccatggcgcaggtggatggatcagcgacatgggaaacatgtcgttaatgacatcgagaggtatagagatgacgatgattctccgggggatgctcccggttgtggtatcattgtgactgagaaccccagcggtactgctactgaggtttctgggaagggggcttcgtctcgggttgctattaaggagactggtgagccgagacttgaagaccacatcgtgtaggcgttgctacatcctagctagtataagccagttgctattcttcgaaggcaagtgttttaatatccatatatcctccgtcgtgtagaagtaagcatcttccaatggaaaatgaataccaccaaaagtttaaggtgcacgaggctctgcgggtttaccctagctccttcccttctggtcaaaaatcgtcacccaccctagttcctccttgaccttaagccactggacaggtataaataccccctccccctccccccccnnnnnnnnnnnnnnnnnnnnnnnnnnnnnnnnnnnnnnnnnnnnnnnnnnnnnnnnnnnnnnnnnnnnnnnnnnnnnnnnnnnnnnnnnnnnnnnnnnnnnnnnnnnnnnnnnnnnnnnnnnnnnnnnnnnnnnnnnnnnnnnnnnnnnnnnnnnnnnnnnnnnnnnnnnnnnnnnnnnnnnnnnnnnnnnnnnnnnnnnnnnnnnnnnnnnnnnnnnnnnnnnnnnnnnnnnnnnnnnnnnnnnnnnnnnnnnnnnnnnnnnnnnnnnnnnnnnnnnnnnnnnnnnnnnnncatttctctcttttcttctttcttcctccttcacatctctgggtctgtctctacttccacttttcaaggtttcatcctccaccatggtcaccctccatccacctttccaccttgatccatcatcgaacatgacttgataccactatggaccttccaacttggtcgccttccactaggtcactgtcattgtgatcccatccatcatggaccctcttggtcatccatcaatccaacatgactttgaactatttgcatttcttgtgacatctatctatccattgaaaggcgaaccttgctaactcgtttttagaaacctccccaccccctccccctcacttcattatgaccaagtgaccatccagcaactagaaaccgttccgggcgacaggcttgcagtgaaagcactccggccggtagtttaaatgctacttactgcaagtttccagcaactgggcgtggcctcgcaaagcgactcagtcgacacgcttatggtggaagcactccggccggtagtttaaatgctacccaccataagttgcctcggggcaaaccgacaaccgggcgtggcttcgcaaagcgactcggacggcaacagcttcttgtcagctattataaacacaattcgattatggtcaataacctctttttacccctcatgttccccttcccttcaatcactaccttcttcgatcaccatgttctccatcagcccccgcgtcaatgctcgtgctcaaacctacaactggcttcatcaattttcttggtcaaactacgtctcgtcggtgtctacctcatattccgtgccaacaaccatcaatgcggcgtctgatcctttctatctcaatgccaatggcaaccaaaacatcgattaccatttcggtcccgaagctacttcaaacaacaagaagcccaggtcaaagcatcattgcttgttccaaatcccagtggctcggtttacaaatgatcattctctccagccaaagaccaaaagccaactgccacatatccactacaggctcggctgatattcaggatgcacataaaattggactcctcgggatttatatatatgcgcagcagggtttgacgtgggggctactaattttcctacattttcgcattcttttgccaggttccaaagtcgttggggtgtgttcgcaaaaaagaaaaacattccatgtctcatacataccaccatagtattcttgttctcacaggacacttcatgtaaagcaaatcaatggaactttcatgatcatctttcaatttcattttaacaacttaatcttccaagtaagtcgagttgcaactactgtcttctatatagtagctttttatttcattatgctacgttcactcttgtatctctggttttttggcgaagcgaagcaattaaatcataacctctcgtgtatgcatgtcacgtgaccaggtggtttgtcctatgggctccaaaatcagtagaaataatgcggtgaagaagtagtctgctgactttggcagaataacctagagaatgaaccatcatatcttccccagagcttctacagtcacactttacgtagtattagaagttagaatcagtcgttttgctctgcaacgactatcgggcggccgtccagatccctcgtaactttataaacttcattgatgcctcaggcgtcacactagtgacgtcaataccatctacataaccccgagctgtcgcaatcccaaattaaggagagccatccctacataattttcctctacaaaattggacgttcgatgttgttgtctcatttgctcgccttgaaaatcaatctttttctaaagcatcaacgccaacaaaagaatgagcacgctccttgaaagactcttccttgcgtatatgatgattgcttattgtagttctatcaaaatttcaatttcttggaactatcagcgagcatgatcgcagataagagctcttcttcaaaagacaagacagaacatgtctccctcttctcaacccaacctcccatcttcattttgccaatgcatctctccctagaggagctggacgagattgaaggccgattgatagattatggcggaagacttacctatgatattgccgaagctggtctcgttttgggaaaagtcgggcgcgtgaagcgtgcagcgctggaactgcgcacccgcggtgtctggacagaggagctcatacccagctcaactccaaaatcaattggcggtggcggcgagccccctctcaagcgcaggcgcacagatcagtacgacggaatcaatgatgtcccggttgagattatcgatctcagtaccgagtctgaaggcgaggatggagctacgaatcaacatgatccatcaaagcagcagatcgcagagaaaaaggcagaagcaattgaaaattcaatcacagtactgaagctcgagtggctggatacctctatcacatccggcagatgtgtttcccaagacccattcgttgtctaccgtgggcgaaagatcccttctcccccaacgacagtgtcagaaaataagcaagacttacttaaacagaaatcaaatcaaataatccagcgtgcaaaggaagatgctggtgtaccaacgccacgagctcctcctccggaccacattcatgcacggcgctcaaaagaaccccctgacagatcttcccagcacccccgaccgacgctataccgaaagacaacctcggaacatgaaatggatgaatctaacgcaccctcacaaccagactgggtccgtgaccaagtcatattcgcatgcctgcgctcagcacccttacaccctccaaacgaagattttatcttgcaactcgtgaaaataagacgtattcgcgaactcaccatcgacaagatcggcgtgcgcgcatatagtaccgccatcgcagcattggcagcatacccatatcccatccaacggccgagcgagatcctcgctttacccgggtgcaacgccaagattgcggacttgttcgcgcagttccaacaacatggtggctgcgagcataccgacgacgacgggaacgttgccgctgccgactcgctggagaaagatcctattctccgggttctgaactcgttctttcagatatggggtgttggggctaagacagcacgcgagttttaccagcgtgggtggcgcgacctcgatgatattgtcgagcatgggtgggatacgctctcgcgtgtacagcagattggagtgaaattctacgaggagttccaggaaggtattccccgtgctgagagcgagggtattgctactgtgattcaggatcatgctgctcgggttcgggcggaagatgcaaatggaattgagtgtgtgattgttggcggataccggcgtgggaagcaagttagtggtgatgttgatgttatcttgagtcatcgtgatgatgcggtgactcggaatctgattgttgatcttgttgcgagtcttgaagctgaacgatatatcactcatacgctctcgttgcatttgacttcttcgctgcgcgagcaacagacgttgccttttcatggtgatgatacaaggaaattcgatactttggacaaggcactggttgtctggcaagacccacacttcgatgctacagctgttgaacataatgaccgtcaggtgaaaaatccaaacatccatcgtcgtgtcgatatcattatatcgccttggcgcacggtcggttgcgcgatactcggctggtctggtgatctgacttttcagcgagatctacggcggtatgcgaagaaagcacgcttcttgaagttcgattcgagtggtgtgagagaccgaggtactggaagacaagttgacctcgaagaagatggagagacatgggaggagagggagaaacttgtgatggagggactgggaataggctggagaccaccagaagaacgctgctcgagatagaaaccgatcagatctcaggagaaagagatggacgtaaaaacatacatatattagcgatgtgtacatcgcagactcagatattatttcatgagatacgctaaagtgcccactagtgacgacaatagcgtacaaagctccaaatcacgcaacccgactaagagttgaataccaccagaccagttcccacatccacacacatgctaggaattatggttatcgaatagattggaaacgggggttactgcatctgccatgttcaagtttcgcaagactcagctacaaccacatcaggtaaacaggaaaaaagtgatatgtcacagcctccacgccaatcgtatggccataaggacgacccagaaaaaaggaaaacataaggtacacaagatacaaatctaccgaccttcggtatggatgcataggagcgaagaaaaagaagagcgcaacaaacactgcaaatgcacaatgcataatcgacctacagcgaatcaatcatcacaccataggccttgagctagccatctcaccatagcgtccacgactcctggtagtgtcgtaagcactgagaacacgcatctggccgccatcgtcggcctgggagaaggcgtagccgcgctgcttacgcatgcgctggacctggcggactttccggatggctttttggaactgttccatgcgtggacggtagtcctggacattgtatttctgaatttcctggacatggtggtattgttgtgggtagtacatgcgcttggcgtacttccaggcataatcacgtaggaggcatatacagggtaggacgatagccatcaagtagaagataggggacttgaagaccacgggaatggtgccgtagtattctcgcgagaaacccaaggctggggcggcgtaaccgtatgccgggaggaagatgagccacagggccattgatcctgggatagcaatgaaggtgtacttggtccaaatgttggttatcagagcagctttgccgagaacggtacctagcacggcggtgtaaagagcttcaccccagacccagtggccggcaacctggccatctgccataggaaggtcccagtagaagagcaactgagagacaatgtagaggatgagagagtggaagaatccattcagaatccaggcccaaaagctgtgcttctggaagaatacacctctctgacctagctggtatagctgtgggtagcggtcgagcaatcgggcggagatgaactggtcaaagattcccatcgcgaatggaggcaggacagtgaagaggacgttgtagaaggagagcgtccacgattcgtagataacctctccggagaatgcgttttggaaagaatactgtaacaagtcaggtaccactccaaatgactcctcaagtttggacttacccagaactgagtcatatacagcgtaatgttcttatagtatgagtacagaatgactcgactgatacgagaatagctccacgctccgtgaaccaaaagcaactttcgaaggaacctgaactggccaattgcgacatcagcagatcgtgcggcctgaaggccttcgacaccgctgataccgactccgacatgagcggcttgaatcatggacacatcattggcaccgtcgccaatggccaagaggagagccttcttgtggcgcttgacaagcttgacgaccaaagccttttgaaggggagagacccgactaaagagcatgttagaacaaaaatataatcctccaaaaattcaacggcgcacttaccaacaaacaacggctttgcaaatgacagccaaatccaggaatagcttctccatgtctttctccaatgcaaaagtcaacgaccgcccgtcaattaccaaagctaaaggttcggagtccccagagacaatttgactctgtacggcgtccattttcttttgcaagctgtcacgggtggcttctgacgactcctcgttgatgatgagaagcgtcatgtcttccgaaataagtttgcaagacatgccgatgttgattgcagtctcctgtcggtcaccagtcaagacccaaatcttgatacctgcagtctggagggtgtggatagtatccggaacaccatcctgcaagcgatcctcaatagccgtggcgccaagaagatagaaatccttttcaatcagttcggccgctttgtccagttcatccgcgcggctgccgtcgacagttgtagaagccttgtcatagatctggtaccattgctggaactcgttttctggaacttcccgcatagccagacacaaggtccgtagaccatctgaggcgtactcctccaggtgctggagagttgcttccacggtagggttatcgggatgcagccgctcaataataaccgtgtcagcacccttacagtagacgcggacctttccatctggacaccggaaaatagtggacattcgttttctagtagagttgaactcgcacactgctagcagttcgtattcaagctcctgtccaccagcctcaaagatcaccgatcttggtcttctgttggtgaatcggaaacccagcgaggcggccccatctaccaaggctccctcatccggcgacgctgcttggtacttgatcacatttgggtcatcgctgtttcgctcaggaataacagtgtgacaggtggcaaggagagtgagaaattcgcgaatagcgttctggcttgggtgcgattgaaggttctctctgagtttcttgaaatcataaatcccaacttcagcatcatcctccatggcagcacgtcggtcttcgggaacatcatcgccatattggataccggcaatgctaacttgcttaaactccatcatgttgcaggtaagggtgcctgttttgtcggagaagatgtactcaatctgaccaagctcttcgacaagggaggatgtgcggcatatggccggggtgtcagttttatcgtagtaaatgtcgaggtcggagttgatgaggaaggcttggaagtatttgacgatttcaatggtgacgaagagggaaatcggaaccaaattcgaatagagcacccagtacgtgaaaatgtccataaaaaactgctttaccactttgaccgacccatagtcgaggtatgcaagcgatgaagatctggtcctccgaatagcaagatcaccgacagaactgatgacactcagaacgatgagaatgctaacaagcatcaaaatttgaatgttgactgttcgctccacggctgttcgcttgatcggggttgctgtcgcatttcgcatcagttttgtctcgtggccactaaaaaccacgattccatgaatccagggagtgttgcgcagcgttgcaccacgaagtaggagttgatccggagccaagggtaactctttctcgccacctccagcattcatagtcaaggtggcttcgtaagtatacagactgctatttggctgttccgatcgaacgcgtccgctcagacgactcagatcactggggctgaccagatgcgcagtctccggaatggcttgcttgattttaagattggtctcaccatccaggtttgccgtttcaatgtagcatagaccttcaggctcagatgacgccaatagtaccaagtcggccggaaaaggctgctcggactcaaccctaactatatccccgaccacaacatccacccattttgcatcgtggaacgaagatcccttaagaacttgtgttttcgagtaattcagtcctctgtccgacattctccgtttgtagtcctctaccaattctttgatcgccgacactgccaagacgatggccagcggaacgatagtcgtgaacttatttgtcggcgacacattggggatttgttgcagaacagcggtaaacaagaagaacaagttggcatatttggagaattgctcgaagaggaatttcggaatgaaggtaaagatgttgtacttggccgtcgatacgaagttgttgacgaacctgtgagtggcattggcaggcgggttgttgagctgaatcatgcgcgggcccagtgtcgagggatcaaccttgcgtgcaaagatattaaggtctgacacgtggaacttcttgcgttgcttcgggggtggcgctggagaagcatcgctcccaactgttccccttcttgcgcctgactcggtcaacggaagatccatttccgaatattgcgatgaccccatgccaaacatgtatttcgccttgcccatcaatccacccccgagtccgagaacgctgttgcgctcatttgccttgcggacgtggtgtgaactggcaattcgttcttcgtccgcgtcgagatcataataacccgagtgcccatcgtcgaagtcatccaaagaataccgccgataattgtccagtccagaagtctgggagtaggaccgatctcgcatgccgctggagtaggggtcattggaatggagaccgatgttggcaggcggatgcgccggtctagaaggagcattttgctgcgttgcgccctgctgtgcgctggatccgacaaagttatcataggaaacagaagggcgcggttgtgtttgggtgtacggttcttcagagtcgtcaatgttgtagcgttctaataggtgttcatcattgacgggggggccttgaccactgttatactcaggtccaggatccaacagcaggtcgtcatcgcggccagcggctggatgcgacccaggaggcctaccgctggccatgatgccgcggggaagctgacagcctcactgatctatcgcaataacaatgcccctgaggcattaatcgcaaggtcacgtcgacagaaagcgctctgctatatctgtcggaagcaggatagttggaaatgaagtatggcaaaaaataacagatttgacgggacttggactgaaaaaaatgtgggaattaagtgagaatgaggtccaagggtggcttagcgggcgaaggcaacaattaagctattgttgcgcgggtaggcggtaaagcagttcacaacaatcaaagagaacattcggaatgatactctgattattattcttactagagtgattgtacagtcttacaaacgctttatattttctctgctctctgctgtgtggtcaaaatgcacttctagtcattggccacctccggtctataatgaatggagctaagaataggggactcttggcagccggaaatatattaacagtgtatcgatgtatggaccgacactagtcccactttagagatgaagatctgctgattgagaagaaaagggtaaaagtagctgatttgaacgatttccctcaaatcttaggcgaccagtttatatttacaactgaggaatagtgattcagttcattcatctactagcccgcacccatatgtcgcccatcacgtggcagccaagtattattgatgtaaacgccatgcgaaactccagtcccccagtcatgaaagtaatggtagtacatattgtttattcgatttgaaccaaccggtcgttttctgcccgagactcatcagccatgccaatcttcgcccgcttagctaggtcggcttggaggaccttctcaatagcagcattgatctctttgactttctcccatgccacatttgtcttgttcacgatcgccatggcatctgcaggtgcacctgcgtacttcgagaggtagcaaacatcgcctgcgctattcatcccaataacaatatctccctcagccgcctgctcctcctttagggtggcatcaacaatgacatgtttgctatcattgtaggtttggaatgtgaccgagagaggcttgtgtgttatattcagcgggacaggaacacgttgttccacgccgtagactatgacacgcccgtctctcaccacagcatccggcctgcggaagtgttgcagcccagccatgaccgcaatgcaggccgcatcggtgatatttccatcgtagtcaataatgtgaacatcggcccgaatcgaccagcagctcacacccttcagaatacacaaggattcagtatcgagggcattagaatggcggatgatacgatcaaggatattggtggcgtatgcttcgatgtcgttggttctgtagagataattgtgagaacaaatcaatatataatgaaaatgcttatgatatataccttccgttttcccaggccggtgagcccattgcactaagctccaggttgatgttgaagagcccatcgaaaggtcggtcttcacgcggtttggtaacctcagcggagatgcgaacaataatgctagagaatcagtcagtgatttccatttgtgataaaccaacaaaatatttgaagctcactttgtcttcccaagttgtagcttcacatgtccatattcttcaccaaaggagatatttagaggacgatagtcgtcaggcttgcggccatcgagacgcacattctcacagagtgcttcgagaataaagtcgcgctctgcgattgagagttgcgcttctttcgacatcgttgagggaggtctagcagccccggcgcggggatcaagagttgctttcttttttgggccattttgccaacgcaggccgcattgtagcagaccggattattattatcccgggagttacaccaataatagcggaagttttgtagagcggtgacggggacgtgaggagaatattagtgcctgaggcgactacgtacatcgaaagctggaagccgtcaacggcccagcaattccaactctcacttagcaaccacatcacaaaatgactacaggtatgccattcgaaccaaaattggagtatttggatagtcagagctaatatttatttagcccacagacctacttttgacccggtacggcaacttttcttaacacgactcttcatggacactaactgatctcaacaggctcaaggtaaagaagccctccgtggcccagcctaccaccagagactcctccctgcgcacaaacacctcaaagttcggtatgtatgccgatatttagtcagacaaccccgatcactgacattattctagccaacccggacaaggcggtgcagctgacgccgacccatcgccccgtgaccttcgcgcggagcttctccaggccgaggcggcgcactttgccaaaaagaatggcgttccggtcgaccagccagctattgctgaatcctccgtccctaagcgattgcttgaagctgcgccccaagatggaagcgagggcgatatccaggaagaagacccagaggccaaacgccgacgcatattggaggagacgcgcgacatcgatgccgattcagacgggtcggaagaagacagcagtgacgaggataggtaggtaaacctcaggaccacatgcttaggacgaataaactgacaaatcccagcgacgacgaagatgaggcagccgagttgatgcgggagcttgagaagatcaaaagggaacgattagagcagaaggagaaagaggtatctcgctttctcgcactttgaattcgataacggcggctaatgcataacaggagcgtgagcgcgcggctgaagaagaagagcaacgtgaggttgatatcgcacgcggtaatcctttgctcaattcccaggatttcaacatgaaacggcgctgggatgacgacgttgtgttcaagaaccaggctcggggaacggagaacagagacggcaaggaatttgtcaacgtatgcttacttctatttggcttgttcttatggggtttaactaattcgttttcaggatcttcttcgttctgatttccacaagcgctttatggtatgttcatatgatcgctattattttgatacatttactaaccgggttttcagggcaaatacgtgcggtagagtcttctaggatactagagcatccagatgttagttcaagggtattcagcttagcgaatgggtcttattcttatgttatcttcaaatttgtatcaaaagagcatcataaactgtcaataattgtatccccaaaaatgctcccagcaatctctacaacagtaccgtttcaatatctctgctggatcgagtggagttttgttgtaaatcagcatgtgttctgtatcattcgaatcggtccctaccaacatatgaaatatactatgagtagtagcttaatgtatggagtatggcttgaaagatattggtctccaatatatgcattaacgtgcattggccctgtcgtcagagcttaagttgaagggattgtagtagttgatttcctagaaggacattttaggtacttgactaaaatgcatatagatgacttccagccaattttgttgtattattattcaacatgattgcacaggagctcgaggcctatttagttcaccagaaccccggctggctctctttccccacaaattcttaacatctgagacggccgaagataggaaagtccagtatccacctttctaaaatacccataaggtactcctgatgagctgtacagcagtggagggatacttaactagggtgctttccatagagactagtcaaccatcccagtggaataacgaagtccctcccgctagggaaagtcgagtacatatcgttggcacatgtaggttgcatatttcttcagaatattgctcatgtctatcttctaaatagaaagtttctataacgatcctaagaagaatctgtgacatacgcaactcatttgggtgcatcaccccacgaggggaacaccattggaagagcctctggagtttgatcaggccaattggcctggattaccttcataatttcatcgtagacgatgcggttcccagccggagacagatgcagacctatatgacgagtgagtacaagagaaatgaaagggagggaatatgcatatttcacgcaccatcaatgagcaaactagccaatctctcattgcttggcacatcatgagccccaactagaggttctccctccttccatccagtggtcttcatgaaggcggaccatagatccaccaccgggatattgagcgatgcaccaacctcgcacgcagccgctgcatacgactttgtgaagctcgcagttctgcttgggaacggggtattctttatagcatcgaatttctccagttgatattcattgatgggaggtgggctgatcaaaatgagtcgtgggttctgtgcgcatgtcgctgggtgttgaatgattgtcttcaagttctctttatattgatccaggggcacatgctggctgtgtgttggaacgcacgcatcgttggcaccgaagaagatagtctatccgatgttaccaattggtatttcgagtacattcgatatttcaaatggggttgctcataaggagggcttaccatgagtcgcacattagctgtttgcggcaaagggaagaacttatcaaagacctttacagcatgggcggttgaatatccactgttacatgttagcatatcccaatgtattatagctttggatgatcttacgctaggccgcggttgacaacatccaatctacgactgtaggctgattatttctttcattagcttattgaccatgcggatctcttgggttgtcagaatattgactcacattcttggagcgcagcatgaaatgcaaaacctagctcttggttgcaggccatttgagtgatggagtctccaaagagaataaattggtcatatggtttgaatgcattcccatccccatccccctgggtctcgatggtggccatggtgaggcaagaatataaaaataagatcaaattacttgggagtttggaatttaagtcctgggaattgaggattgggggctgataacaacaagaaacggacaggaaaggaagtgggggaagtcactccgcggacaaaaaggaaattggtggaccttcggttgtcaactaaggaatgaatacatgtatatcatcaagactagatcatgagaactacatacatatgtatgtacaataccgattatctaaatctatataaaatctcaaatcaatttatctatccgttcatcgaattgggggtccagatctgaaccccgcactatacgaataggagtataacatagacctttgggttactattatatcaaggtagcttacatgagtataaccagattatttacgtccggcatcacgagtttgagacctctgtacactctaagaatgcccttctcgtcctcctggtccttctaactgtacgaagtagtaatggtgatctgtgtccatcgcgaccccacccaattccagttttccaattactatagttattcaaaggaccatgggtggtcagagaagacacaagaggaagacgaagtcccgtgttagtcccgatataggaaggggccacggcttgaaatggccttgatgaaagttttggaagactcggaatttcagagttcgaacacgaaagtcgaagtttttctgggattgatataagttgaagggccaaggctaaaatatagatgaataggaagaaaaagagtgatcgggttttcccggcgcttaaaagtgacacctaaggttcgagcacatgtaattattccgcggtattcgcataggatgaaagctagcgattctcttgttgaatactggcatggaatttttacatgtctagctcgatggctagttgatttctttctccctgacctacttcgcttactgagcaaatttaccagaactagataatcaagagatctagtaaatgaagatatcgaattgcaccatgaatgtgtggatggatatagaagtgcagagctatgggttatcggaaaaatgaaacacaggagcaagtaatttctcttttacatgacatcgctgtctgatgatgctcaactttgtcccactattcagcatactttttccttaggagagagtagctttgagaccatgaatgtctagttcttcgctgacttcaagcaacacacgtgcatcttcttgtactaaaatagttgtacacaaaatatgtgtagagttatcgtgaccccgacccataaaagaagctttgggactacttgctagtcgccgaaacccccatatgcccgaaagagcggtaaaggggatcgtgctgaaaacggtgctcaaaatgatcttctagctaactacgtaggtatggatctcggagcctatggacgacttgtttataacggatccttcaatgtctatcaacatgtaaagctggaaccactccccgggtgatatgttcgacagtatcgagtttattcatacctcaaagtagactggtcctcaagtcacccccgtgctaaagctgatattcacatctgaagaaagtcagacatccgaaagaggctgacgttgtctaccttaggatgacagagtcacacacccacccctcacacggtggcgcacgcttcataaagcatgccaagagatcagcgttgggtgacgatcggattggacaacgtctggcagaaggattccctcagctgggcggatgctcctagtttagtaacccaaagagatacttccccaatcaactaactagctatgatacctcgatgctctcgtttatcgtcaatgattcatcagtgtgtggaatgtacattcgcgattcgacgtgatgcagccactctaggcgtagtgaccttgttcatcttgatcagctgggtcaaagtgtccattgcgacaggcatgctctcctgtatatatattgtagggcaggatgtaagtatacctatgtaccccgtgctcgcgacgccactctggacgtgcagcggcaccccgggattcgtttcgagatgttgatcgtaggaaaaaagcagggagagagaccatcaaaccaccagcacaacatgccgagcattgaacattcagtaaaatatattaaagatacgcaaaatgactctagtggctggggggtcactctcacctgacgcgtccccgccgtttcgatggtcacctcatcttaagactcggaccctcttttctcaccgtccatctttttgtgtttttgtgtttttgtgtttttgtgttttgtttttatctttccgaagaatataacttttggaaagagaatatgctacctagtaagtcgagctccttgatttctttgctcgtgtgagttgtttgatgtggatcatctctagatgtcaaaactgactccttgctagccccactgcatataattgaagcataaaggcttctcggcgacatgcctcgctcccttccaaagtccagttttgcctcgcgcgaacaggacgacaccgaaaacgtgcgcgttccccaaacagctcctccctcaccgagtatctacagacgatctcaaagctacctctccgaaacacataccgaataccagtccctcgatgcgccgttcgaggttacagaaacaacgagcctccttgggcccgcccaagccttccgccgacgaggtccgcgacggtcttacaccagcacctccggggtttcgggcaccggtccggactcatttagacacgttctggcggctggtagcctgcggcggacgctaaatcatagccgtgccaactccatgagtagggggttcagccggcgagggagcatggacggcgacagcagacccgctagtcttcctccgtctatgaaggacaatcttactgcctcttcatttctggatgaacggacttggtatgatcaattcacttccacagattgggtgcatgacagtatcgccgatggagcgcggcttcgcctactccgtcagcggaaagatgtgcgaggccgattgctggcggctttcgacggtgcgcaaggatggatcttggtcgcgctcattgggtgcatcacggcctccattgcttacttcgtcgatgtcaccgaaggatcggtctttgatctgaaggaaggcttctgcacgacccggattttccgcaatcgaaggacgtgctgtgaagggctggctgcttgtgatgcgtggcggtcctggtcgaggatcttctcaccatcgggtacagaaagccagtgggttgactttgtcatttttgtcttttgggttgtggcattagctctcatatcgtgtgctttgactctactcacaaagactgttgttccttcttccatttctcttgcgacgcttgatgaaaacctgggcgctgacccccgtggtacaaaatctgggaatggccttggtgcctcggattctcctctttcggagacagagacaagcccactacatggaactttgcctaattatccgtcccgtccagctatgatctactactctgctgctggcagtggagtggcagaagtcaaagtcattaacagtggttttgtccttcatggatatctgggcttgaagacactagtcattaaaaccattggcttgatttttagtgtttcgtctggtttgagcttaggcaaagaaggcccatacgttcatattgctacctgcgtgggcaatatctgttgtcgtctgttcgccaagtataacaaaaacgatggaaagcgacgagaggttctgagtgccagtgccgctagtggtgttgctgttgcctttggtgctccgattggcggcgtcctcttcagcttggaagaagtcagctattatttcccacccaaaacccttttccggacgttcttttgttgtattgcagctacgttgtccctcaagttcctaaacccctatggaacaggcaagatcgttttattcgaagtccggtacctttcagactggcaaatcttcgagattttcattttcatccttctcggtattatgggaggcgccgctggtgcgctcttcatcaaagcctcgaatctatgggcacgatcattccgtcgcattccagctatcaagcgctggccaatgcttgaggttttcctcgttgcgttgtttacgggtcttgtcagtttctggaatcggtacaccaggcttgctgtcaccgaacttctatttgagctagcttctccgtgtgaatcagatgtggaaagtacgggcctctgtccccgcactgacggcattcttgaaattgtccaggaccttctggtggcgtttgtcatcaagagtttcttgaccattattacgttcggcatcaaagttcctgcgggaatctacgtgccatctatggttgttggtggcttgatggggcgaattgttggacatttgatccagtactgggctcttagacacccgacttttttcttattcgactcttgccctgcagttgctggaattgagtcgtgcgtgactccaggagtctacgcattggttgccgctggagcgaccatgtgcggcgtgacaagactgtcggttacattgcctgtgatcctgttcgaattgacaggaagtctcaaccacgtgcttcctttttcgctgtcggtgctctgcgctaagtggactgcggatgccattgaacctcgcagcatttatgtaagttttgagatccgcctcgtaacttaaatttgacattatactaattgaaaccaggatctcttgaccgacatgaactcctaccccttccttgatagcaaactccaaccgaccaccgatgccttgctgggggatatagtccgaccagtgcggaagaatcgcatcatcgatatctctgcatcaccatttttgccagccacagacctccgtttgaaactggaacacctgctcatggcaggcgagctagacagcggacttcctattctacgggacggtgtcctagctggtctgatcccggcaccggatctcgagtacgcactagatacgctgggcgaggaagaagaaaatacgatctgtctgatggccatggacgcttcttcagccgtcttggacagcgataacgaggatgccgacgaggtggatttcagtcaattcattgaccctgtaagtttggttaacttcttcaatatcttggcccatactaatttgtttatacataggctccaatcgctcttgatgttcattcccctatcgatctggtctaccaatgcttcgccaagctaggtcttcgttacctctgcgttactcgggacggaaaatatgccggcctggtacacaagaaagcattcgtgaaattcatgaaggagaatagcgactaggccgtggaaatcggtcgaccactgtactacttctcatttgcattttccggcgttgcctaggcattctacttcaattgtttgtatagccttgcatatcctctcgtttcattccatgtctatcgattatgtctgcctactcaaccaacattggcactgtgcatagttttgttgtatatatctttcttttggacagctaggcatgaagtacaaactttggaacatacttgactagtcatttatcagggaagaccatatcctacccatgtctaaatcaatttttcaaatccaaccatctgaacctcaacatccccgtccttcttccactccaaatcaacaccctctccaacccactcggaaacctccccggggctaacaggccgccacccattcttcttgtgaagcccatccaacgggaagaatgtatcacactcaaacgaagtaggcacatctacagccccctttcgcacaacattcgtcatgacaaccctaacaggccgaccacgtagctcctcggcacccatattcaacgtagcattataaatctcggccccacctataacaaaaatcttgccaagcgtcccctgcgccccatacacagagtccaactgctccaaagctgcgcccagactcggtgtaacaatcgcatccgtcaccgggcccaccggcggagctggaacagcatccttgggcggctcaagagcttccttttccgcacttgtggcctgtgcctgagcggccttagccgcaatctttctcctcatattccctaattcggcagtcacgctctcgcgaacagacccggatgtgtcacgcgtgaccacaacgttaatgcgcttcgcgagtgggcgcagtgaggctggcactgagtcatacgtcttgcggcccatgatgatggcgttcgtcgtgcctggacccggtgggcgggatgttacgcgagcgaagaatgacatgtctgtttttatgcgcggccatgggagcgtgccatttaagccgattcctaggcgcgtgatttcgtcttttgtggttgtcgacgcggtgcggatcggggtcgtcgccacgatcagggtgagggagggaaggggttgcgggttgtgcggtggcattttggtttgcgaggtgatcgtagttgcaattagagaacaaaatattgttattcagagatggggagtgtgatatttgggttgtgagggaggttgttgaatagtggagtggaggctcgcgtcgcgaacagagaaatcgttatcggagttgggccgcttatcgcctcgcagctccaggtacacgatccaatgccaacagggaaacattacactactctattctaactcggtcagcgaagcagcagagtgatagtcaaaaatgtgtttgtattcaacatcacaggaaaaccgaatacgccacaacaccagtcgaacgccagattaaagggaccaagtgggtatcacgcgcgagacagctccaagaaccaacgaccaaaatgcttaaaggagatcctcggaaaattatcgttacttatcggattgctcagagttcttggaattctcagggtcttccgtttcgtggtcctcaggttcatccgacgatggcatcaacaatcctttgtcaagtgcgctctggatggccgtcacatcctcctcgagcttttcacgacgctggacatcccgctcgtcttcgccaagagtatcgagcttaccgaagagccagagctccttcatgagacggtgcaaggcgagcaggtcctccgaggcacggatctgagatagcataatgtcaatttcgtgctctggtgtgaattcagaagctcaactgcatttttcttgggaaggggagaggtggccgggtatgaccggggcggcgcatgtcaacataccagcgcagtggattctacatcaatctggaatgcttctacagcagcatcaacgtgactggtgccgtcgaacttgttggcagcaatggcgacgatattttcgaaccgctgcagcagctgcgagatatcatagtcgacgcgatctgccgcaatacatcgttagcggaaaggtatgggagcatggtatagttgcagtggctcaaatatagtacgcaccaagcaactccttggcagttggacacgaatccatggttggagcgtactttttgttgtcttcggatgatgaaggtaaatccgcgatccatgttgattacgataagaaaaattgtggggctggaagatacgggtagacacgggacgggaacaaaaccgacattatccgaacttaacatcctaacaagccaaggagtaagccatcgtcgctccatatcttgagggccttgctcttcaatgcctcccattcctcgtcttggaattgaagacccatcgaagtgctatgaatagacgtgaaagtgtctgcatatctaggaaagagctttgaggcccaagagcgaagaagagtctttgggcctttcggccctcgaggacatacatagttggtaagatcttcgcggcccttctcacgaaagatagcagctagccgcaattgctccccagctagctcattagagccgttgtagaactcggccagcggccacatcatgcacgggaacaaaatgcggtttgggtccattcccagtctatgactcccacaacatcgaaacaatcattaaccaaatatggtcacccttaccatccagattttgctaagccgtcaggcggtgaagactaataagtcacattgatcacctaggcacttcagataggctatagccatagatgtatgtaactagaaatactgaatatgcttgccaaataactccaacgtattgagtaatgacttgtataggagcccacagtttttacagtataggctgtatcacacgggaaaatgtgatatttagccgtcaagtggtggaatacccgaagcagcaacactagtcttcaagctgatatcctcattcaaatctgatggtggtcatgtactttgcagatcgggaggatgccagcttggtattgaaataagaccgtatgacactggcctgtggcaatagttgtatatcttaattggccatgtacttcgacatctcctacatagtagacttctcttagcacaaacgttgtgctcactttgttatcgtagtgtgcgaatagtaccagcggtgcaagttggaagacattgcactgctagatattgagtaacatatgttatgtagaatacgaaatatgaatagacgttatggaatggtggagtatacagccttggaatgcgcgtatagtagaaggtctagccctggggcctatgatcgtcctttttcctccactttaactctccgctttactctccgcccctaccgtgcgtcaccgcctacacccttcgacaatggttcctctctaaattactcctcacaacaataatcctttcctcctgttgctaggtttgctacctggaaccctttctctccgtgtctgtatcatcctcttgaggcctctatagtcgcaaccttgtgttactttggtctcgatttcgcatcacttcgcttgcaccgacggcccaatcatccgcgactcaacttgtgcctggcacatcatataccatacgtcaccgaatacttcatcgcgtctttctgtggacttgagattgctcgtgaatcgcctcaaacccatcaataatctcgattacgataccaaccatcttgaaacgcgttcccttcatctgtgccaataccatcgtctatcttccctcaactccctgctggatgttctgatcaggtctccagatatttgtccttcgaagacagggtggacggccggtgggccgtctcacagattgaaggcggcaggagatattggagaaaaaggtgtcgaattgaagtaacgccgttcgcgcccctgctcttagggtggactattccaactaccccgcgtcaccttctctgctttattttctttttatcttgagttctcaacactggaaactggactggcgatggacgcgcagtatccctttgcttcccgtgacgacatttggcgtgtttttgacgagttgaaggagctccacattgcccagtacgagcaaggagaacggctcgcgcaactggagcgtcgccgggacgaggatgcccgactgagaagtccttggtgtcctgtctcgccgtttccgcactcggttggggcaatcgctccaggtagtccacctctgcccttcacgatcagctcgccacttaccaagacatcccttccagaccccactttccactcccccccggatgctttcaaaggattcgatcaaggtcatcattccgcaatggccagttctgcgatcggattcgatggcgaagacgagcctagacggggtacgtcacgagccaacagtgtccgttttgacgaaagtgctatccacgggaacggccaggctagccgttccagcaatgaccttcctctgcggaccggcagcggcttgagcacccacccgcttcttgagcggacattttcacaccaatctgatggacgattgagctcctctggccactcacaccattccgctcggactaacagcctgcgcctgaacaccgctcggctgcttggtactacgcctatcgagtcccctctgattccccctcctggactcttcttgcttggaccggtcccgtccatcattcgctgctggttgactgatactttcactaatggctctctcctctatgcagccgtttgctcgggctcttacatctcaagtttgggtctctctatggtccgcgaattcgggttggagaacatgattgtgtgcgagggcgatgtagagtacatcaagctcccgctttatcttcccgaagcacttattcatccatcttcatcacgccccggaacccctactcaccaagttcctgccgtgaccattcgctttgtggtttgcgagacagaagtcggcgataattcgattcaaatcatcattggaagcgatgtgatgcgtgcgcacaatgctgatattttattctcacaagataaactgatcatggtggacgatgaccacaaccgcgtgtctgttcccctcgttcgtcccgagaaggactccgtgtttaagtccctccgcacttctcctaatactggagacatacgggaacctcctactaacggacatccatccgttggtatcattggccggcctgccaatgttcaacagaaacaggcctcagcgcccccatcgactagtctgtctggcagcgagaatagcgatcctcacaagtcccacctacagaacctccaggctcatgctcacatttcagctgaaacgcgctcagctactgtcaatccaccgactcctgagcctactaaaactgaggatatgccatcttggggtggcccatggcgtcgcgatgccaagaaatccgccagcactgcccagaaggtggcggataaacgcgagatgaaggtcttccgcaccggaaaatccacgagccatgcaaactccacaacttcgggctcgggtcctggcagtgctaccactgagcaggccgacaagtcgtctttgccgattgcttctgtccaccacccaaatactccttcggacaagtatggcacgctaaatcccgtgggtggtgcatcggcgtttggatggctcaacccaccccatcataatgcctcctcctagatgaaacagactaggcttggcttttatgtttgattacaaccgaatctgaaatgatctcggcttatggcatgatacgcaagggttgcgattccctggaaatcaggaaaagtgagaggcgctgagttaaaaggctgccaacatagaaggggaaccactttttctttttagcttgtagtattgctggaatgacctactaagtaaaagagaaaaaattgaggaaaaaatgatattcttaccatttaattcgcatgaccaggacaatatcaactgattcgattctattagtatatgtataatcctcctcatctcccatacattcataggtacagggctggacgttagtaaatattagtaatcaatactccagggggctggagtgcaaaatttacgggaggaatttcagcttctgcctggcaagaatacgttttactcgttcgtttaaaatcacagccaaaatcgagatccagaatcaggacgattggccttgagagcaataataatggcaggtctgctggatcttccagctgaattgattctagccatcggtgactacctacaaatgggtacgagacagataccactgccattccatgagcttggagatgcctaccgctacgcaatagagcgtgatccaccacctagctccaaatcccttcattctttcctactcgccacctgtcgcctgaatagtcttctacaaccacttttctatcgtgatatatttgtccgcagatatggtcatgtcggcgcaccatcgccactgcagcagctaaatcggagtcttgaaaaggacccaggtctccaagagcacatcatctcagcgatcattccatgtgacgactctatttatgatatccatcatttcttttggttttccaacatacgagaccttactattcacaagttcagtgattgggagcctttagaatttccaaacaactcacatattggcacttcacctgtggaatgtctaaagctgattgattgtggggcgcatgagggagctctagccgctgtattaagctggccggcatctttgaagacgcttcactacgacgccgagcaaggtgagtgggagggccatattggagacgaaccagccaaaacctggacatgtgctgcttttgtgcgcacgctgcaaccgcaaaaaacaacgttggtagaactgacgatgacacggccaccgcttgtccatgaaggactgggcaatggacctcgcattgatctgagcgagttcatggcccttagaatcctgcgcatttatcatgtcttcctctgtgggtgggatgctccgcatggggtctggaaaggcttacctcacagtctggaggtgttggagatcttttatgacgataccgagctcactgaattcctgagtgagactgataatttggagcacgacaatttcatgctcgatttgatccagcataagagggtgcatcttccatatttacacacagtgaacatctactcgactgaaacagttcctaattctgaaacagaggaggatgtgctcgagggaagctggaggctggcaccatctttgctcgcgcgcgaagcgaaatctgctggtgtaaagctgaaagtatggctgggatacggggataatcaagacttcgagaaaccgacgttttcgagtcactagtcaaaccaaataatgtattcagccaagtggtaaccacttatcacatgcattctttcctagaacatctactatgaaagattagttaagcactgtacgttacttaaaccaggtcccatcaaatcaaatctttgaaaaaacccccaaagcccccttcgtattatccttcgtttccttaacaagcccactaacagcccggaacgcttcgtgcgaagcatcaccaagaatctcaaaaaggacactctcactactcgtaacaacagccccagcatccctcaacctggaaagcgcaatccccctctcctcggtgttcatactgctgacgccatcaacaaggatgtaaacgcggtgaccgcgctcgagaagatcaagcgtcgtctgcgtcacacagatatgagtctcgatcccgacgattatcacgtcaaggggcgcagagccgggggccgggagcagcttctcgatctccggggttatcattgagaagagggttttatctacgtcagctcggacgtgtgtgtcgctgaggtgttgctggagttctggcacggtgttgccgagtttcgcgcggttctgggttgttacgaacacggggattttgagggctgaggctgcgcggagcattttttcagccgttaagaccctgttggttggttggctttttggtttcaattgttcttgggatatgggattcgtacagtttggggaactcgtagattccattgcggaatttttcttggatgtcgcagatgctttggaattgagtcagattttgaagctatatatccttgtttgatactggggttttgcatacaagagtgccggattgcctggtctagtgttaacttgcactgcattaggattcgggggtttcttacggatccgagatgagcgcgcaagggtagccattactgcaacagtttgtggttcctatgtgaggttttagggactcggtaaaatgtaaagaagagaagaattggcggggacgtggggagtcggagaagtcggaaatgcggggaagaagccgagggaagacgagctggtagactatctttgtttcttttaccgtaaatttcaatcgattatggtcatatttggatcggtatatatcgctcgtctactaatctagggatctatagcttcacctcatgcaccttggcccgaccgacaaaccagctgtcatcaccgtttgccgccgctgtgcgaatggcataaagctcgtcgacgaatgccgggacgaagcttcccgggccgcgaacataatctttggccgctgcgttctccgctgcaatctcgtacatgagaatcccagacagcactgcgaggagtctgtcagagcggtgggcaaccaggaaacagccggagattgtgccgatggcacagccggtctgtaaattcatgttagctgtgtactaaaaggatgtgtttggggaggttgcatactccggtcacttgccccaggtatgggtggccattctcgacggcaatgacccgctcgccatcgctgaggtagtccgttgctccggtcaaaagcacaacgttccctatcttaaattagaaaagaggaatcacagctagaaagcctagagagtcacttacgctcccggcgagccaggtcccgagccaaggtggctttttgattgccgtcaagggtactaggtccactgtcgacaccgcgctgttgaacagtactgctaccccaagcttggcgaatttcgccctcgttgcctttgatcagatcaaaataacccccggccataagctgggtcactgcattgcggcgaatgtgtgtcgcagccgcaccgaccgggtcgtagacgactgggttgccccgctcattgtacgccttgatggcttttaagtagtttgagacactctcgctagtcaatgtacccatgttgatcaaaagagcaccatcaaacttgcacaagtcggtggcttcatcgccatatggagacatgatgggagatgcaccactgtagaacggttagcatgaaaaatggctggccaggtacagtatactgacatagaaagggcaacgttggctacgaagtttgacacaacaaaattgatcatgttgtgtacgagaggatgcacctcgaccatcttacggatgatttggggcacctcatccaacaaggcctcgctctcgttagcacgaggaggattgagagcctgtgcaaaccggggagggtttctgatgagcccggcgagtttctcggcggatgctttggggtcatcagctgccacgatcgcactaacaatggctactccatccagtgatttctttggtgactgagactgatagagcactcgttgcacattagagtggttgatgccgccgatagaaaccgtgcctatggcggaagatttaatcgcatctaggatggcttgagtacctgctgttccgatgactgacttggtattggttttgctatgggtggttagcgtctattgatgggtgttggcatattgaaaatgtggacttacgtgggggtggcaaacatagtaccaattccgatatagtcggcgccatctgcggtggcttttatagcctcctcgactgaggacgtactgataccaataatggcattctcgggaagaagcttctttgcttccgcgaagcctatatttgacattaatacatatatttttgtagaattgtagcaacgaactcatgtcatcttgacctagatgcacgccctcggcaccaatggcaagagccacatcgacccggtcattaatcaaaagaggcacattgtacttcttggttatctggtgtagtttccgggcagtttccaccaagagaccagtgtcattggttttgtcccggtattgcaccactgtcacgcctgcagtaggggttagttgaataattggcaggaaggctggagcaccgttcacctccttgcaaagcactttctaccactgtgcataaatctcgtcccttgagaatggccggcgtcgaatccgtgaccaaatagagcgacagatctacgggcatggtgtgttggccttgggccggacaaaagcggggagtttcggggtaatagatccgaagtcgttctgacgaagagaatcaaaccgaaatgaacaacggattgacaagtccagcagaggctgtacaacgcaagacactgtacttaagtcactgaggaagattgccgtttatcgttgtgtggtcatggtggggtcttgcaaggttcggcctgtactcgtccgggtgtagagaacattgtaaaattcactcatagcacctatatatgcttcaatattgccaatggtttgctttcaaagtgaagagactcaaacataaggcaattcttgtcaaaagtcacctcccatgtactactatacccaacgttcagtggccatttatactccgagttatttccggcacgtgcccgctgacataaccgtgatttgtcaaattctgcttttcattttcttcttctactttttcccaacaacacacaaacactgacaggcatcgagagattttcgaagcctttatctatctaccgcgtggacttccagttctacgctattcattattgatcactggttagttcggcctcgccatcatcacttttcaccgtccgccccaaggtctccgacctctgactcggattcccgaaagaacttcgatcgttcccagcaagcaacacgttgagaagtttcccgcgaacttgtctatgtattcgtcctccgtccaaaatttcgaacatcacctgccgctcaagctgcaaacgtttcgcgcgccgaaaccttgcagcatacaccttcgatcctgtggctgaataccccggatctttcctccccaatttgttgtgacttttcctaaagaaatcacattctataatcttcaaaaaagaaacttgacacgcatgtcttgtctcgtcaacaaaattctcatccagaatcctcccagctttccctcaagcaagcccactgtttcattctagtgaaccaaccgctcagttaaaccgtcatcatggccaccgtcaatattcgccgggatatcacggatcccttctatcgctacaagatggaaaagctccaggctaaagtcgagggcaagggcaacggtattaagaccgttgtcgtcaacttgaactcggtcgcccagtctctcagtcggcctcctgcctatctcatcaagtacttcgggtttgaacttggtgcccaggccaacgctaagccctccgacgagcgttggatcatcaacggttctcacgatgcccccaagctccaggactaccttgacggcttcatctccaagtttgtgctatgcaagaagtgcaagaaccctgagaccgacgtctctatcaaggacgacaaaattaccctggactgcaaggcctgtgggcagcggtctgatgttgaccctcgcctcaagctaagcactttcattgttcgcaacaaccctaagggtggcaagaaggagaaaaagaagtcccgccgtgagcgaaacaaggagaaggctgccaatggcgaggatgctagtccaggtgacagcaacaactccgagaatggtgatgatggagattatgctctcgaggccaacagcgatgatgaagtgacccgtcaagctcaggccatcgaggccgaggccgagatcaaggatcacgagtgggccgttgacgtttccgaagaggccgtgaaggctcgtgctaaggagctccccttggacctcaagcgtgcccttgtccttgaggatgtcgacgacgagggagctgatggaccctcgtcctacgagcagttgggcagctggatcgttgaaaccgctgctgagaagggcggtgttaccaacgttagtgatgttgagatctacatgaaggctaaggagttcggcattgagagcaagcacaagactgttgccgttctggcacagagcatcttcgatgagaagattgctaagcagattgaaggtcgcgctggtttgctcaagaagttgatcacctccgatcgccatgagaaggctttcctcggtggtaccgagcgcttcgttggccaggatcatccagagcttgtcgtccagatccctgccatattgctgggctactaccagaatgaccttgtgtctgaggaaaccctcaaggcgtggggtgccaagaccagcaagaagtacgttgatatctcgaccagcaaaaagatccacaaagctgctaagcccttcattgagtggctcgagaatgccgagagtgacgaggagagcgaagaagacagcgagtagacggtccacgctgcgtatgctattctgtacccttggctatttgctttttgcctctattcttaattgaaaatgcagttttgggccttggtctgcccatctggcattaagtgctcggttcgattttcatgttagtttagctcatcaatccccactcctttacaatgaatatctatatggtatcaaccatcatcaattttcatccacactagtcgtacttgagtacttgtacaagttatgtacgaaagcagaaactttttgtcatgcaatgctatcaacgacgaaaagcaataactagaacattatctcagcaagtctgacttgcgactcctccccattgacaaggatattagtagcaccaccacagttactagcattgcctgtagggaccacatccgcccttaggcgatgccgcataaagataaaccacgttaaatccacattccaagtctccatcgcccgaatcgcttcctcgacagaaaccatattttcaccataagtatcattcacagacatagtcgtcctcgaagagaagaaatagtactctggccccacaaacaacgcaatccagccaccaaggatctcgcaaaccctatcacccacttccaacggtaaccggacatgcaaaaggacagtgataaaaagagagaccaacgcgcgccacagacggtggtgcggcgtgaagaatctcgatcccggcgttgagggggagagcgaaagggacgaatatagggctaagtgtagagtggacgccagatctcctgattcagcggcagtcacggtcatggtcgtagcctgggaccgggcacggcgttcgttcgcggccacggcgtcaacgcgcactttatcccatacttggcggtacagccgatcccagcgggagaattcggtttcgacgcgcgtggccataaaatcacccgcgcctttgcacattgcttccatggcctcgcaggctgctaccgtaacgaatgtttcttcttggtggtctgggatttcggggttgcgggttgattctgtggatgaagtggcgatgagggatttggaggtttcatttttttgtgacgaggggaagattattcggcttgctactgtcggccagaggtcgtttattagaggaagaaagctcgtttcgttttgggatagggcgggtaggacatcgataaggattgagaggagggagcgtcgaaggtagggagatggtgaggttaggtgggacgggatagatttgacaatgtggaggaggagggcatgggttttgctaagcggcttctcggcatcttctggctctttggggggtgggagtgacggctcgtccgattcggcttggttcagaagctcttcaatggacggctctggaggaggcttgtcgtatgtttctgaccatggctttttggggtgagggattttgccatcagcatctactaattcgtcctcggcatgccgtttggctttgcggttggcaattttcgcggcgatgattgagattgagagattctcgtatcgagacttgcgggtgtcgtgggagccattctctttgctttcctcgattgtgagcaaagagggtttcttcgccccttcctcgacgactgcagctagtgttttgaacatcacctcaacgagtttgggataaccgtgatatagatccaaaataccaaatatagaatcaaccagatcatccagataaggtatcaacggggcaccgcaaagcttgaccatcataaacaggacttgtggcgggtagggtgacacgtcaaatgtattgagtttcaaggctaccgagttcaccaaatagtccacgttctcaatgatcatcgtactcgtgtctgggtagttgcaggcattggtcaagatatttaggcatgtcatggcgtggcgttgaaggttaggattatgtgatgccagcagctgtaaagttgggtagagcgcatctatgagctcaggtcggaaatcctggccaagttgctgagcttggagagccacggattccaaagccagtgctgatatacgccagtcatctgttccatcgactgacagttcgttcagtatatttaatgagatataatacaactcttcaatcatgccgccacggtcagttgatgagacagacgcctcaacatgctcaagacagatgaaatcgtcaaagctggctgttgctgtagtgctgtcccgcaagaaagtcatcgccaaccagaaaggcgcaataacagaatcacttgatgtcgtgtgcatacggttgacaatcgatcgagtgatctcatttccagactcagacaaattcaatctagtaatcattgactgtagatctttgagagtttgttgctggctttggtgttccaaaatgatgggaggaaatagcttcgatctagcgtcggtgttgagcacctcccagttgaagctatcatccattgaggctaacggctggagagcattggtgtttcgcttgacaacggcaccgaggctatcacataggccggatgccaaaccgctggtaagcaaatctgatccagattgaacttgagataggacctgaaagaccgtggagatctgacgaagcccccactgcttagcaatctcatcgtttccttgcatgattcgagggaaagaagtgagccaggtatgcagagattcttttaaacaatccaatactgtggggtatgttgtggcaagatgagttacgttcttaaaggcttcattcgctccctcgtcctctttatctgccagaacaacaaccgtttcaatcatcataggcagagaatctgaaagtgtggtttggcactcttcaattaccatcagggagaggtctaggacggcagactgaacctctggccgttgatggcggcgaacttggataatactggccagcgcgagcttgatctgcgttgtggtggctttcagccaggcttcatccagagctatcttgtcgcttcgcagctcgggcggggagacttccaaggcgacacggtcgttgagaacagctcttaggagccccgagagaatctgcaaggaagtctggaggagcttgtatgacctgcgagtctgtgttgacggccttagaatcttagccagtgccgacacagtccggggcatgatgctggcaagcacaacgcggtccgtaactcgagcataaagtgcttgcaaagccttagcagctgccagggagatctcatctgatctatcatcgacaattccctctagcaggatatatactgtttggtcgacaaccgtcgccgtgccgatctcgtgataaattgtccgttctgggacaggcccttccaagaccgtaaatatagcaccgaggcagtcgaatccagcaatacacagttcttccggaaccttgggcttcggtagttgcttttcttccgtcttgttcggagatccccccacgatcaacgtcaacaggattatgagttgcttgcccatcgcaggagatagcctctgccgccatccatcggcgaccagtattcgcaaacagtggacagcggactctaagcatcgtgtgggtagtctttgtgtttcattgaagatatgcgacaatggaaagaatgcatattcagcgagcttctcgtcgagcgtattgttccccgcaagttcctttaaacagttgtgtaccggctcaagggctcggagtatgtcggcagcggaagcttgatttcctcggaaacggaggcccacggagctgagttcaatgcatggtgctcgaagctattcagaaatcagcattggtcgtcctaagagccgaagaagcatatcgtacctgcttgaaagattcctgccggaggttttccattgcagccgaacaaggtcggacggcgtcagagttgcaagaaagtaggctaagtgttgagtagtatcaaatcagtagtgcgccatggaacaccgtctagcagagccatcgtgatcgaactgcatccccaagctgcaccgctctgtcatctgccggcataataataaagcggtgagtgtaatctatcccaaacgggcaagatagcactgcacgtgatacgttagcgcgtctcaacgcgtgggaaacccgacagctgcctgcgacacagagtaactagccactgttgccttggctatttccattgcggttcttgtctgctcggggtatttattgagccgtatttcgtgcccatttgacttcgacagaaacttctatgcgggtgttgcgaattcgagagcttgcgctgttatcgctctcacgctcgcgaccaagcttctacatacgatctgcaggacaacacaattccttgaccacatcaattgccaagctatctacggtcttgttatatgccagtagtatagctcaccaaaatcctactttgaagaaaacagcatcctcacaaccgcgaatcatggccgatgacaagagcaggaaacaggctaccctggggtatgtacgggatggccagcaaacgattgggtgcgtcgacaatattcgatggcgcatgcgccctcttaatctgacctattttgactcttattttcattcactcggctaattcgttgtgtttgtcttgtaggaggttcttcggttcgggcgccaaccaaccgccgaaaaagcagaccacattagcttttggcggaaagagacaagcagcaagcagtaatgccgctgatactgagctcacggataacaccaatggatttaaggtggaggacgctagcaattcagcaccaactgcagagccaacgaagggcgtgaagcgggaaaaaagccccgaggcggaagaaagcgatggttctgatattcagcctgtctctaagaggcgacgaaaggcttcgtcgaagagctctcccgctgctaagaaacaatcggcatccccggagaagcctgagtctataaagccaaaagttgaatcgccatcaccaaaaccagcaatgaaaaagctctccgatgttactcctgaagagaagtcaccttcagtagtagaagacgaggacccactggaaagcgaagatgaagatgacctcaagccggagctcacgaggaaatcaatcgaaaagttccaagcaaaaatacaagccagtggtaaagatccatacccagactgggaagcaggcactcctgttccctatgctgcgttatgtaccacattctctctagtagagatgaccaggaagcgtttggaaatcacagaccattgttctcttttccttcgccaggttcttcgcctgacccctgccgatttcctacccactgttcaactgatgattaataaacttgctgccgattatgccggagttgaactgggcatcggggagtcactcatcatgaaagctattggtgaatgtaccggccgcagtcttgccgtcatcaaagccgatcaacgggaaatcggagacctgggactggtcgctgccaaaagtcggtcaaaccagcctaccatgttcaagcccaagcctttgactgttcggggtgtacacgaaggtcttcttggaattgccaaggtccagggtcatggatctcaggacaaaaagatttcaggcatcaagaaactgctgtctgcagccgatgccgacactgctggcaagggaggcaaaggggtggatatcaccaaggacaagggtggtcccagcgaagccaaatttatcgttcgctttttagaaggtaaactgagattgggactcgcagagaagacagttcttgtcgctgtctctcgggcagtccagattcacgaggctgagtcaaccggaaataaaattccttcgacagagcaaatggccgccggtgaaaacatcttcaaaactgtttacagcgagcttcctgcctatgaagtgatcattcctgccgttcttgagcatggtctctttaagttgcctgaagtgtgcaagctttctcccggaattcctatcaagcctatgcttgccaaaccgacaaagtctatcaccgaggtccttgaccgttttgaagggaaggaattcacttgcgaatacaagtacgatggagaaagagcacaaatccattttgtatctccagattctatgcaccagtatcctggagccttggaaacattgcagaaagacagcaaggggctgtcctcaatattttcccgcaactcggaagatctttcaaagaagtatcccgatgttttaggcaagcttggcacttgggtcaaagctgacgttaagagctttgttctggattgcgagactgtcgcatgggataccgaagccaaaaaggttcttccattccagcaactgatgacccgcaagcgcaaggatgtcaaagcggaagatgtcaaggtcaaggtctgcgtgtacgcctttgatctgcttttcttcaatggagaggtaagactattattctatttgatgtctatataagagcgattcgctggatcactcttcctctcttctccttcctcacgattcggtgttctttcgcgtttatggtgaggatgatgagagagaaaggaggcacaccgagtcgctttgggctacatttctagttattctcgctaacttttcgacagccctgcgtcaagaagtctctacgagaaaggcgagagcttatgcatgagtgcttccaaccgattgagggggagttccagtttgcccagtatggcaactctaatgttctcgatgagatccaagaattgctcgaggctagtgttaaggcatcttgtgaaggtcttatggtgaagatgctagacacagcagagagtggctacgagccaagcaagcggagccgcaactggctgaaggtatggtgcctctgtttgttggttatttcaaccgtgctaacttatacaaaggtcaaaaaagattacctcgccggtgttggtgactctcttgatcttgttgtactcggggcctactatggtcgtggaaagcgtacttcggtttacggtgctttccttctcgctgcctacaaccccaacaacgacacatatgagactatctgtaacatcggcactggcttctctgaggtgctacttgaagagctacatcagacgttagttcctctggtaattgaccgcccaaagccattttacactcactcggccgtccccaaggaccaaccggatgtttggtttgagccaagactggtgtgggaagtcaaaactgcggatttgaccctcagcccacgctaccaagccgctgccgatgagttccaaggaacaaccggaggtggaaagggtgtatctctgcgtttcccgcgatatatgaaatcccgcgacgataagaagccagacgaggctactaccacccgtgccgtggcagagatgtatcggaaacaagaagcagtcaccaaggacactactagcaagggaggtgtggatgatgactttgaatattgaaacgatattgtcagacgcactatagcgaatgtagttaaattcatttggtattgatattaaggccttgacaagtcgtacgcattttctagaatggcaccattgcttagatgggtgcatcatcacggggcaatgacaactggttggcaccaatttatcaattcacttttaatccaactattcctttctaagacaaagcccctgctgatcggcatccaatatcatgactttattctacaggtaatcccggctatcagcgggctatcagcggactccgcgatgcttggcgctgcaagccaagcagccggaccctgctcgggccctgagtcgacctgcgcccgcctttctttgtccgcagcacgtcttgccagtgccttggaagtaactgatagcacgaaataacatcatgcatatctttcttggcaccgaggaatgtaacatgcccccctcgacgctccgccatggctactactagctcacaacgcgtgtggagtcgcaacacttatatttcagtgtcggtccggaatgcagcccatctggctctctgcacatttttcttgggctgtgtggttacatacttcattgtcgatatgcgcgtgtttcaattgacgacggccattgggtcgatcatcgtttctgcggcagctcttactcccgagtcagtgctggtctcgcccgattcattcgttgtacctattggttggtagctgattttttttttgtagacagcttatcgcggctccaagacgcggtgaggctattcccaacccatcaggggtaagttgcacaattgtatgtagatatcgacaatgttattgacctaacataggaagttgcactcttttccacctctgaatactccttcgagacccatgctacatcgtcatggtggagtctgctggatctggagactgggaaagtgacacagcttaccaatgacagcaatgtctccgaattgatttggctagggtctactgactcgggtctcttatatatcaacggcacgaacgccgagattcccggaggtaccgagatttgggtgtcagatacctctaatttcgccaactcgtgggtttgtctatgacatgtttgaatgaaacgttaataacttctgtgcagtgcctacaaggcagcttcactgccggcgccgctttctggcctcaagacggccattaccaagtctggagatattaacttcttggtgtatggagagtcctactctaatggcactgcgtacaatgcagagcttgctgccacgcccctaagctcggcgcgtatctacgatagtatttacgtccgccactgggatacctggctcacgacgagattcaatgctatcttctcggggactctgaagaagaaacgagccggacacggagcgacatcccgctacatctctagtggatctctcaagaacctcgtcgcaggagtgaagaatcttgagtcaccctacccaccattcggcgattcatctgactatgacatctccgctaacgggaaattggttgcattcaagagcaaggcgcctgaattgccacgtgcaaacaacactgcttcatatatctatcttgtgccccatgatggatctaaaaaggccgtggctattaacggtccaaacagtcctggtacaccgaacgacatcaagggtgattcgagtagtcctgtcttttccccagatggccgtcacattgcatatctccaaatggaagacatctcctacgagtcggaccgtcgcattgtctacgtttataccattggctccaagaatactattcgtacattggccaggaattgggaccggtctcctggtgcaataaagtggactgctgatggtgaaaacctagttctgaacaccgaggactctgcacgttctcggcttttcttgctgcccgccaatgctggtagtgatttcgagccgaagaacttcaccgacggtggcgcagtggctgcttactatggcctgcctaatggagactatttggtttctagttccgctatctatactagccgcacagtttataccgcgaagcctggcaaaggtatcacgggtgttatcttctccgccaatgaagttgacccggccctgaagagccttggtcaatcagacgttgatgagttctactataggggcaactggacagatgtaagtctaccgttttttcatggaactgaagagatattaacattgtagattcattcctggatcatctatccctcgaactttgacaagtcgaagtcttacccgcttctattctttattcacggtggtcctcaaggttcatggggtgactcctggagcactcggtggaactacaaggtcttcgccgaccaaggatatgtggttgtcgcgcccaatccgactggtagcactggatttggtgataaacttacagatgcgatcgcgaacaattggggtatgccattctcatcactcattttcattctcgccttctaatgatcaacaggcagctacccttacgatgacttggttaaatgttgggagtatgtccgggacaacttcgactttattgataccgaccgcggagtggcagctggcgccagctacggtggcttcatgatcaactggatccagggtaatcccctaggtcgcgagttcaaggcactggctagtcacgatggcacatttgtcgccgacgcaaagatctcgactgaggaattatggtttatggagcatgaggtatgtatcttattcgtggtattttcattgttcttatgctaactcttcaaaagttcaatggcacgttctgggacaaccgagacaactaccgtcgatgggatccatcggctccagagcacattaagcaattcgccaccccacagctcattatccacagtgatttggactatcgacttcccatctctgagggtctggcactgttcaatgtcttgcaggagcgaggtgttccaagccggctgcttagtttccccgatgaaaatcattggtaagtataatggagacctttgggtggatgggatgtatcatcgcagagtcatagaactaattatattgcattcaaatagggtcatcaacaaggaaaatagtctcgtctggcatcaacaggtcttgggatggctcaatcagtactctgggattcgcacccctggcgctgtcagtttgaatgacacagaaatccctgttgtggattataatcctcagttttaggctcgtttgctgcaaacgacggccttctgcatgccatgtctcagatggcttgtttcgtagctatctcttttttcgcagttctatgctgtgtccaacttctatacatgaacaatggaatcatcacaatataacctctttttttcttatgccttgtgttctacctcgtggaatctgccggttactagcagcgaatatagaaaatccccagttgcctacaaacggctctcaccgtagcaaacgaaatacccctcaaaagcatccttctcccacaaaatttcgtcttctttgctatctctgagtttcatcaaaatcctttcctacttatcaaccatcatgcctcccaaaccttccacccgtaagggcgtcaagaagggtatgtcccatgctttgtcccctcatctatcatcatcgcccattagaaataagcaaaaacgcatacactcggctatcctagagagagctaacaaaagctccctgtcagaaatgcctaagacggagccctctactggaacccattccccaagtgagtactggaatcagcttacagaccttcaactggctttcttcgatgatgctacacaattcagggtttctaatccttacgtctttggtacagagatcaaagctgaggtgtcttctcccactcccgcttttttcgccaatgatgggaacgagagtgagtacaattttgacatgactcctgtctcaggcccaatctcgtacctactgccatataccgaggattattttaccttatgtcatgctcccactgccgatgccactggctaccctatctttgtttcccgaaatggccgctgggactggttttatctaacaacaagactacagagtctcccgctatccccgccaatgatacaacgaacttgaatacaaggaacacaaaaagtgagtttctcgataatctcagtcttttcccaaatctatttagatgtactaagggcgacttcaccttgtatccttatcccaagcctggtctcaattccgccaacactcccacgttctcttctcaaaacggatgttgggaatagatctttctcctatctaacacggatacagagtcgtcccctctcagtgtcaaaatggaggatatccccgaggccaatccgaggatccagcgaccgagcaatcccgtctccagcacattctctgacaacctgggccacttgatcttcacacgcggtgtccccgacagcgacgatgatatctcatcggtaccctcgctagttgaaaacatagccgagcaagccaggaccgcgaagcatgtggggttcttcatgaacacttcccacaacaaacacttcatccccattgaagtaccctccctccttggaaacgagaactgggaatactggttggccgccatgctcttactcttccgccaacactcggtgtggcctattgtgactgcggagcttcagccactatcccctagtcacaatctgtacctatggtaccagcgcatgcgcgattgtgcaatcgagctaatatatgccaacgtctccgaggaggttcgcaagactccttgtttcatcagcaccgtgcacgacgatgatccgaatgttttgatgcgccacctgtacgctcactatgcctcacctgattcggatcactctgatgacgagtctgagcttgattagtgtagtgattggtgtttggcaagaattttcgtgttttccactgctccagggttccctgatatctaagcaagggaatattttgcccgtttcatccaaatctttcaatatctgatgtttggtgctattttatttgcaggtacaactttttgtcttaatagattatttagtggttttcctattgctagttcagtgttcttctactacattcataagtgcgaattacacgaaatttggaagcagtacagacattctctcagcaatgacaatagtagtgggcattaccgttcaattcaatggagttctagtagtaagtgtgtatataagaagaacccccaagaaaagctctagggtgtacttgatgatgcttccctttgccttcatatatcgaaatttttttctacgtctgtgtctatctacctttctctaacaagacaaatgattatgaacttacaatatgatatatatttatgggaaaccatagcacgacatcccaaatcccgatctagaacccatttagattcttctgcgctgtaataacatcccccttatccacaaagtccactagcagcacattcggcgcattcccatacaacttagcgcatagtcccgcctgagcaccaatactcccaggcccggttgcagtattagtagtgtctgccttgtggcgagctggaatctttatgccgaaaatatcgacatcaaggaagtggttgacaatgcccatacggcctgtagcagcggtatcagagggtcggtcgatgctgcagtttgagaaaaaggagtctgtgacgtcataggctgtctcgaagtagtaggcgaactcgtcttgaatgaagttcacttttgtagtatcagcaccgtagtctgaaaattgttagtcgaggtatagcctatctctttgtgattggtgctttttacccaggaataccaccaatctctttcctctggatatcatgtcacccagtgtgggccagtctgatattaatagcggatttgcgaagggaacgtaggcgtagttatcaatcccgctgccggagaaagtgtctccaaattcggtgattgctattgagtcgccgttcgtcaagagaagactaacaacttcattcgggtttgtatccagccagttttttatagtcgtcaagaatgatttgagtgttcctgcatcttcgagcaagcatgaggtatggcacagctctatgatgttcccgtcaaggatggagcggtgtgtttgcacttgcagataccggattcccatgtcaagttgggcttttatatcgatgttttggttctgctggggtaagggtccgacaaaggcagagtcgtgggagcctacgaatgtgatattcgagtaggaccgggtgcagtactctgagcggccattacaggttgtcacagctaggtttgacatcgaaggagtggtcgaggagattactgaaggctcagatgctcgcggtactagtattcctggttctgacactgcaagcacaggctgaagtagcaagagagtactcagcattgtacatctcaatttctggtggattttggtcatcgtgttcaaggtcgctttggactatacttgactctgagcgagaaggcgcgctgtttcgccttttattccaagacttctttcttgtcttagcagacaccgtgattcataactactgtccccggtcatgcaggagcaacagctgcccccgcgagatgattatcagctgcccctgcaaaagtggtatgctcatgcctattcctacatacactccacatgccggtccatgaccaaacgagaaccctaaagcaaaaagaaaagaaaccgaaactgactataatcacgtcgatacctccagtgatagagtagcagaacatgaccataaatatcccagtctcctcgtgaccgcagtcatgcaccaataaacggccccagcgtgtgcgccagatatttgatcttagagaattctctgtaaacacaagcgatttgagatatgacaggaaacttgttacattatatctcgctaatacctgctttacaggtaagggtaggttcagacgatagtacgacagacttcagtacacatcgataatcgctgcttggatgggactggcctcattgcataatcgatggaaattagatacctgtaaagataatatcgaggttcatagtcattaacataggccaatgctcgatgatttatatggtgttgcgaagagcaaatatcccacgttatactataactaccccgtcacattcagaattaattaattcatttatagtcttcgacatacctttggcactactgagtctttccttcttctcgtttttattcttaccagtctgacacatttgcttcccgatatcggattcagcgccatcaggctgtgctagatagccacacaacgtttccccttgaacatacaaatggccattggcaaatcgaattaagttatgtgcctttgaagattacatggtattatgctgtttgtctttttgggcccttcatatcgtatcactgtcttaacaccgcttgttgggaatcgccgattgacgtgatgttgtagagaatcagagattatgttcatgcagtactccgcacggagtaccgatcaggttcaattgtaatagaaattatctcatcatgcagatgtacaggaaagctagaatgcactagcacataattagagatgttcaccgtggaaaatattcgaagggcactagacgtacgtcggggtatatcggcaatgctatcgcggtcgcccaaagcatgtgtgatggctcttcgcatcctccgtctgatgccttacaaaatattcatgtgccaaagcctctcagtttggtagggccgaaagatatctggcggacctgcaacgttgcccaggctcttcaagaagcatcgggacatatagacaagcagtatacacagggcgcgatcgcaacaatgccccgcgaacgtgattggggttcattcggacctgggtggggggtgaattttcttgtatctgatatcaaatcagcatcgccttatatgaactttgggccactcggggaccttcagttgttcgaccttcgtttcaatacagctgctggcttttgttggatactccctaaccttccgtcggattccgcgtcgtcatatccatgctggagattgagatggattttggaacgggcggcaacggagtatctatcgagggaccccctcttccagtgggcttcaactcctagtacaacctctagacacgccaaattctaggccagttgagctgttatttttcgggttatattagttagattttgacatattacgatatagggccagtttttgttttcaacgaatttatactcttttcgggaaagcttctgtgtttaagtactttacatactcttcatcagcatgtatgatgtgagataagcacgtgtatatgaaaggctatcaagcttgtgcataccccatatctgcttttcgtatgactataaaacagagaatcaagatagagactatagtaagatgttccatatatcggtcccaagcagtgtgaaaaaaggtgacacttatcaaaagagctaaatagccgtgataaaatacgagggcactcatttgtagctttcatattgagaaactctcgatatcttcaaggttggttcaatgttgcttgcacaaagatgtgtaaccaccttactactcaaatattcttcgacagttcaaggcagaaaattaccagagaatagattaaagatagagagtccatgtgtcagtgtttttttgactatcattgtccgtacaattgtgaaagcatgaaaagtacctggcagccacttgtggctggtgttcggcccctaagacgggcccgacccagacaacggagctctgaactttcattctccactgtgttcatacccccaagctcgacattccactccttctctctatattgtacctcataattcccctcctgttctccgaaataacattctgatcaattccacgatcgttctctcctaacacgctatcactgattcggcctcgtctccacctaggctgcataacggggagcaatggtcattcggagatttcgctcatgagctcgatggctgagggcagtgagggttggtcgcgcgaagacgagcttgacctaggccacgaaggcgatcaccgacaacccgaccatggtgccctcgatcaaacattaccttccccgcaggaaccagtggaagaggaattggacacgatagacgaagcggggaaccacgattccgagaaaatagcgggacataacgatttcccagaaacccctccgccgcgacacgcggactggaccgcgtcagggagcgcggatggaacagggtcaaaccccgacgattccccatcgctacatgttagtggtacaattggcgcataacctggatagctagctgattgacggcagggctctcttcagtcctctctggatagcagtgctctcgcgctccgcggatctccgcgagtcagcccaagcccggctcgtcgcccctttgaccttcgctttcagtcccgattatcttcatcgccgcaaagtttatctagagccggctcgccattcctagcgcatcttcactccagacagtcttcaataaccagccaggtctccccgaccccagaaacagaagccgaaccgctccaggggccttgggatgtggtgcgatggacaaagcttcggaaaatcactgggcaagcgttttctgaaatcgggaagcgcaatttcggacgaccaacttgccttgcagtctccacgtcgattgtaataggtacatccaagggtattattctcgtgtttgactatcagcaaagtctgaagactattattggaacgggcacaccaggtttgtcaaaagacgtgtacacctctggcgcattgtactgatgatttacctagctgttgaatgcggtgctgtcacatcactggcactttccgccgaccactctaccgttgcaggggggcatgactctggcgatatcttcacctgggagatttcgcgctcggcaaagcctttccttcatatcccgccaattccggccaatcaagtcgagactcgaatatccgatggccatctttcaggttctgcagtcattcatatcggctttctcggcaccaggcgaaccgcgctggtctcggctgacacacggggcatgtcgttctcacacctggcaacaagagggatgggtgcagtggggagaacagtcaagacgactcgaattctgggtcgatatcctcaggcaacggcagatatcatgcggcgtaagcctagctctgttcttgctttctctcctctgccactcggcaacgtagagcaatccactgattcgttgggcctcgttgctatgctgacaccctatcttcttgttattgtgtccaccacacccgtggcacaaacccaacacaaagcaccgagaccaaaggaagttcccgctcacagtgccatgaccggcgccttggcatggtttccggcaattcgactgaagggcaaagacacccaaacttcaaacacaaaacttgtctactgctggtcaaatgtgctgaccgtgctcgaagtctcagaagccgagtcagacgaacctgcaaacaaggacaaaccccccagtcttgtcttcagagcgcgcagcagatggagagcagatgaagccattgtggctgttcagtggctcagtcgctcggtactcgcagtcttcacaataacgcagcggctgctaattatcgaggattattccatgcatgtgaccgactcggtcgatctcgccaacagacatatatatcacaccgatctcttctcgtcgcaactccattcactggttgaacagtttgacgaagaggacgagtcgatgcacggagtggtagcagatgcattccatatgagttttcgttcttataaagggcgcttgttcttgcttggttataatgaagccttggtgggcaatctctcaaattgggccgatcgcttgctggcgcttatggaggctggtgacttcattggggccattcgactagcaacctcgtactatacgggagagtcagaaaagctgacggttgggcttcctgaagaggatgttttgagacagcccattgtgcaagaaaggcttttggaaatgatttccgcctccctcaagtatgcttttggtcgaaattacgaagcaagcaacggccgactggagaaccagcagctagaggagctagccgatgtttctatcgcggcttgtatctacatggctgacgaagagttcctctgggaagaagtcttcaactggtatgaggagcaagattcggcgggcattttcctggatgcactcgaaccgcgtatcattgatgggactctgcgatcactacccccgaccgcggtcaaggccttgatcaaccatttcattggaactcactcgaccggtcgattggaggagatcatctgccttcttgacacgactacgatggacatcgatcaagtcacaacgctgtgtaagcagcacaatctttacgacgcctttatatatgtatggaaccgctgtctaatggattatgtgggtcccctagaagagctactacatctgattccctcacaatccgagcccttggccaacggcgactatgtgattgaaatgagacggcagaacaatgcgatgaaaatgttcccctatttgtcatttatcttaacgggtcgcatctatcccaccggtgaggacatggatgaggctgaagccatgcgagccaaaacagatttgtaccaattcctcttctcgggtcgtgcgtccggtacggtacctagagacaccagcggggcagactccttctctcaacttcgagccatgctcaagtttgacgcttccagcttcatgagcatgctcaatgaagcattcgaggatagcttcctaaatgagcccgagagcgaggatgtctccgcgtccggcatgttaatcaatcgacagtacctcatcagcattttgctccaagtcatgaccgccgattttttcacgccttttgataccatataccttgatatgtttgttgcgcgcaatctgccaaaatatccacagtatattctcctttctggcacaactctccaccaggttctggtccgtgtatgccaatatcccgatcaggaaatggcagacgattgcgaattgagtgcagaatatctgctgtctttttaccacccaccggacatccagagcatgattcctctattcaaggaggcacgattcttccggattctcaagtcggtctaccgtctagagaagcaatatcctctgttggtcatgacttacctagaggatccaagtgatcgcgatgctatcttcacttgtctgcatgactgcctccgtccaggctctgggcttggaaaaaaacagagacgcggtatcgtggatgtggtcaaggagcatgcccgggagatcgcttcgattgacgtgacgcacgctgcacagacgatgcaagacctggcccctgaaacacactctacgtttttgcgggttttgcaagatgatccccagcaacagtaccagtacttgctggtgctcatcgagccgcaggctcagaccgcggacacccaatcttcgcccaatattgagaactggatgatcgagcgatatgtgcagctcttgtgcaaatataacccctctcatgtggcggacttcgtcgacggattgcgagtcggtgacatccgcttagatgaactactcccgtttattgaggaaagcggagctatcgatgctgccgtcattctcctcgcccgacagggtcaagtccgcgaggcccttgaccgtcttgtcgcacacctgaacaccctcgaatccggtctggtaggcatcctccagagcgtgcgcgagagccccgactcagcgactaccgccgaggcaatcgacgacctcatggagtctctgaacaagtatgcaggtgtcggaacgtggctctgtcagggccaaagtaagacagtcaagcagtcgcgcacaagcagcgccaacggcaaacgcaacgcgccaactctcgatcaacctctaacgtttgaagaactcctttggctcgaccacattgaagccgttgtgcgcatcgcaagcaacgtcttcgccttcatacaaggaaacaacccccaaatagcccttcccacccaaccaaccacatccctcaccggcgaaagcggccgcctaacaacctcattccgcaccctcgtccagcaagtcttcacagctctcctagcaagcacagtaaaaagcagcccagccacaaccgaaagaacagacatgtccttcttacgcatcctgcgcgcattcctgagtcgcgccgcaacctggtcgccctcactcctcgagctgcgcgccgtgctagcatccatcttttccgcctactcttacgagaaatccctgctgaccctcgcaaacggcatgttggaccgcgacctcttcgtccacgtcgacgaagtcacccgtctacgccagcacggctggcggccccgtggccacacctgcgagctctgccgccgtcgcatctggggcccgagtgttggtgacgcgcattggtccgcatgggaagcgcgacgcgccgatgcctattcccaccgcatcgcgagacgcaatgaggatagctatgacccgtccgagcgcgggaagggcaaggctgctgatgtcggagtcggccatccgtcccgtctggatgcggggcgtgcgcatgcgcatactcatagcgctcgcgctggtggtatctccgatgcgaatgctgaccatgatcgtgaccatgaccacgaccacgccgaggatggagctggatctagcaccgtgactacagtcatagccagtaccccagaacccattgtgattttcgcctgtcgacacctctaccaccgacgctgcgtgctggacgccgtcagcgcgggggcccgacccgctgaaaccgcgtttcggcgcgaccatttgcccgactggtcaggggccgagctgttctgcccagcctgtacatagttttcgggggacaccgggaatgattatttcctttgtgtctaggggtattcttttgttactttttttttctatctctttgtttttgcctactttagatgctgttcggggaatatccctagatgaggatcatcttgtcttgcatatagccattctccttctttttatcccccactctttgtaactcccaactgaccgtaatataatgtgctattaaagccaggtctatccctgtcatagtcatccgtgctagtcttgtctgtcttccgtcggaacaggtgatacgaatggtgatgttctttgcttcagctgttcagctcatttcccacatgcgctcagctgtactctcaatgtgatcgaataaaaatttctactctgattattgttcggtcccgctgcaggggttcgcgggaacactgatatggcacggcttttcttccaggtggattctatgattgtgttattttgatccagagggtccaatgctctttgcttttggtagtgatctacaatagatggtgtatagggccgggatgaatcttggaatgacactgtcattttactgctgtgtttgatatcagttttgggtaggatctccgtgagcactgatcatgtaccgggggatacatgaaaatatgtacttccactggtatatctgtatgtgttggtacttgtgtctaagtacctcaaaatggccagagagacctggtgatgttcacgaattccacctgagtccgccacttcatttttaattcctcagattctcgatctgactcttcacttgctgaagaattgcctgacaaaaattcccggtaacaaagaaagaaaagcccaaaaaggcttgatggccgagagtcttcaaacagctgttgacctatcatcttccttctcttccctttactactacatatgcaaaccttagatgttggcggtactcactctgattggtcgtggatagttacattactggtttgatctatatgtctctcctttctttctccaaatccgaaacatttaaggttggtgtttagcgcttgagatatccatggatccgatacggttgaaggtgaatacactactatattgtgtacccgtgaacattgtacgttgttgcttgctatcctaccctgaatgtcaatctgagcacattacagaatagaccggttcaatcggcaagatcgaaatgatctactgacagcattgatacagggctcggaggtgtcagactgattagatgtttcaacatgccccctttaaccgcatatcttcgattagagtgtctggtggatgtatcacgctgctccattcttttttctgtttttcttttttcttttttcctgtttaccattttcttcctggggagagtggaggcgtctgaagtataaaggtggtccctctccctgtataaagcatcgatcaatctgtagtccattgtgcatgttattgtgcctaggcctattgtccctctctattgtgattttgtattcattcctttccttctattgtttcttgccattgtgatcagtatctgggatactagatctttcccagtctttgacagactctctctttccaatccctctttctcctcacaaacatcctacaaaccccctatcatttaagcataatgcagctattctcagcccttctgcccactgtgggcttgttagcgcaggtatcttccgctgcatacaccctacgcgatgactatggtaccaccgactcgttttttgacaagttcaacttctacacggtatgtctatcagcattggtcccgactttttgcctcataataaactcatcttatatataggacactgaccccactaatggttttgtgagctatgtcgaccggaacaccgcatcgggcaatggtctcctcgacacgagcaacggcatctacatcggcgttgaccactccaacaccgccagtacgcctggccgccagagcgtccgcctggaaagtaccactacctacaaacatggtcttgttattctcgatctggcacatatgcctagcagcacatgtggcacctggcccgccttgtgagaaccccagccgcaatccctttttattaatcagacaaggaaataagaaaaagaaaatcgctaacaccctccagctggatgctcggttctaactggcccaataacggcgaaatcgacataatcgaaggcgtaaatgagcaaacccaaaatcaaatggccctgcacaccagcgacggctgcactatcaacaacggcggcttcacaggaaccctcgacacagcgaactgttacgtccaagccagcggccaatcctcaaatagtggctgctcaatccaaagcgacagcacccagtcctacggcacaggcttcaacaacgttggaggcggcgtctacgccaccgaatggaccggctccgccatatcagtctggttcttcccctccaacgccgtgccggctgatatttcatcgggaactccaaacccggcgggctggggcacgcccacagcactcttttccggtggctgcgacatcgactcgcatttcaacgatctgcagatcgtgttcgatattaccttctgtggagactgggcgggctcggtttggggttcgtcgagttgtgccagttatgccgcatcgtgtgtcgacttcgtacagaataatcccacggctttccaggagacatactggagtgtgcggtcgcttaaggtatatcaggacttgactagctccacgagtggtgctgagggtgacgatgaggaggtggatgctgattggaattctacggcgtcgtacgagcgctctgtgcctaggagttctatgaggcatcgccggcagcccaatcatcataggcatggccatgcttagatgctgatgctgatggatggattgttttctgcgttgaaagtgatatgggttcgatctgttttgcatttcgatagtgatcttcgattgtaaatatcccctttttttcagcctgtttcttgattttcgttcatcttacggtctctttactcgtccgggctccgatggtctgtgctggtccacagctgtgggaggacgagcacatttgataggctttattctttattctttatgatgactttatgaatatctcttccatcttgatgatggaatgaaaatgggcaataacaatcatgagcatggttatgctctgtatatatttcttctgagctgtaagtgctgagcagactacgattgatatacaagacaagaatatatacttgaatatatgtaccaactaatagtcatattaacattaagattaacctcacgccccaaacccaagaacatcgcgttgatcatccgtaagccgaccccactccaaaagcaaccggaagaagtagatctccatatcctccttcctcaacgccgtattcgcccacttccgcccttcctccgcaatccacttcccctgctgatcatgcgccttcatgcgcatcttcaggggcgcattaggatcactctcctcggatgcggcagcaggcacgcccgcaaagtatgcaagcgtactccacaggccatggagacggatatcgacaggcacaaagtgcatccatgaggttatacgggagtcgaaccactggcggaacaggcccgttttaaggggcaggctgtggctgtgtaggaaggggaggaagcggccgctgaagcctgcgccatcgaggtcgaagaggaagcggtgcgaccagtgtgcttggaagtctgcccagcctgcggtgcccagctctgcagcttgttcgtcgcagtcgccgcagcggacgattgggtcggcgaggtggacagcggtttggagatgtagctctgcagccggggcgctgccgtccattgtctcgtattggaaggagttctcatttgagtctgctgggaggaggacggagacttggttgttggtgttattgttgattagatgggcgaagcgctggcgtggcatgcctttccattcaccgaagcggctgacgccttctgatgtactgccgagccagtatagagagttctctttctggccatagtccagatccgggtattcgtctgtcggttgatatttcaccttgtcgatgtagttccatgggcttgggaagaggatgtcgttgaacccggtgagagcactttggctgaataccggaatgagttcctgagacaccttgaaggaggccggggagattaggagaccatggaggaaggcaaggtcaggttggtggcagatttcggaggcgaggttgaaatctagggggaattgacccatggaatggggagccacgcatgagagacatatatcacgacggttccagattcgctgagagcgcaccttcgatgacggcgggcagacagcgctcacataagggtcgaaaacacccctccacgctccgtcagtgaatacggtaatgttggtttgatcggccggttcaatcgggtcccagccctcctctcggttgttcgaccatgtctgcaccatgcgctctttggggatcattgcttgcatcccagtctgccggttcagcatcgatattttctcccagggaactgcaacacggggttcatcgttcagattgaataccaagtccatatccgggagatatttggtaaaattcttcatcatgtccgcggcacccgccaccatccacgcatgggtcggttttatgccttcttgcaccatggccgtgccgttgcgaattctgatcccaccgagatcgttgaaagggtttgtggctagctcgtgtgtcattgcacggatgtgctccggagccagggctcgaaagggaagtagatcatggtatatctgatcgaaatcatcgatgataactgacgattgggcagtggcatattgataccattcaccaaagcccctagacaaagattagttgagttgtgcacatgggtattcaaaacttacggtggtggatgctgattatatcgcctctggtattcggtgacagcgtcgccaagagtcttgcttctagacgcctgagcgagatagttgtgatgatgaattccaccatcctttatgaggaactcaatcgggtgtatattatcaaggcgatgctttctcactgcaaaaacgagactgatcccacatagcacggcaaacaatatttgtatggcaacgttggtgcgatataatttcggctcttcgtcatgaaccactcgcgtaagaagaaacaagagggtacctgttaaagatgccgccaacgggagaacagcatgagttagagagataaatgggaagggtgattgtccagtgagagccgataaagaggaaaagtatacgatcatgaaaccgcctataattgacaccccaaggatgtcgaaatgcggcaactaaagaaatcagtattggcagagatgagtatagataattgggaggaccaacaatatgccaggcagacaataccagtattacaaccaacacagactggctgaaagcgccgcgcgaatactctagatccaacattggttgacctgcaagttcaggcgagctatccggtacccagatggatataatactccagaccaaagaaagaccctagaaagatcatcagaaaaaatactccccacacgatcgtactcgtctgcttaccaagagaccagctccaaggaacgttaaagttcgttttctgcgcgcatcatcaaattgagtgccaatccgacatagcttggtaataccgataagtataacagaatcagcaaagaggttgaacagcctatatgatcgtaggtgcgatgcgccatttgatacaataggacagatataggttgaccgggttccagccgagaacgatgaagccaagagcccaccagtcgacaagaatgcggctgcaattaagcctctgaagcggctttgcgtgagataatagaagctccggcgtgaaatggagtatatcacctgtagcggcggcttgtcgaatcgctgggtggggacatatctgtccacttgtcgcgatcgatggttgcgccagtagtcatagagcgaaataacgaaaggaatagtgtactattcatgacgccgtattagtcgcatgagaaattgaatgataaacaatgtattcagccacttacagcgtatccagcaggcgcgcattcagtgtttcgagttacttggcggaaagactcgattcgcaagccacacaaccccaataagagaccgagctttatccaccacgattggacccgtagccgagggcgagtctcgacatcacccagtacaaaagatgaggttgagacgcgggaaggaagctcaaattgttccgcgagagggataacaggccgtttacttgtcggcgaggatggcgccgaccccaatgagatgaaccgactccataccaaaatagtggcccccgtaaggaaacacaccagaactgatgtactaatggggcgatctataccggcgcaacagtcagatcaagttgtaagacattgatatccacggcgacgactcaccaaaagcgtatgtggtattataggaggtaataaggaatagcgagcttaaaagaaatatgctgcccatataatgcgatcatgagcctaagtctccaacaatgtgagatagcttgctagatactcaccccacacagaccttcaacccgaggtcggaagataactggatcatattgcgccaatcagtttatgatcgttctaaagcgtcccaggccatttctgtgagtccaagaattaattgaacagttgagaggtgacaagacaaagacacctcctgtagatcttcaggagattgacagtgttcgaaacatggaaagaaaaagcagggtaaggagggccaagagggccctttgatccactggcggctaatcagaggcaatccggagtgctgatccattagggttgcgtcaacggacgggttatgatgtatttcacggttggaccttttactgcgcatgtaacgatgggccctgccttgcattgcttgtattctaataaggtatcttgccaatgagtggtggaacatctccagccactatgctcaaatctgttagctcctggtggttagctggtttttacccggagatacattgtattgcaaaagcaggtcagcaagaaatgccgagccattcagcggccagaatcaagccttggtcaacttcacgacccacttgagtcctgagcgtcatgtcgcttgtgcgaccttccaatgcataagctgttgtacttcgtacatcatgttcggctttctaggcagatcctgcaagcagctgtcctatacatcgatgtacttgacgaaggtacacacagccaaggactagaacacgcgtcatattagccaagaacctgtttgttgtaccctgtcggctccattcgcatgtggtgaaataaagatggcccaggcgacccatggttagcgccaaaagagcactcaattaaatttgactaagctcaaagcagttcgtggatttcctagctggatactccacgtcatccatagccacgtgatctgataagggtccaggcggtccactgtctatccaatgaaatgtaaccgcggctagtccgtttcgagcattcgacctcaacatagagtatcccacgtgacttcccaaccccgcaagaccaatcatatgtacatactaaaggccatccgtataacctcttataagggaccttagaaaaatggctttcttattaagcgtctttgttgtatattctcattgactacaacatatgttgtatatgcccgaaaggacgcagggctggtctgcagagctcatcagatatataccgcctacttctttggggtgaccctggcaaatcacagccacgtgacaggatatacttatataatcaagatggaggcggtgtatacctcgggcggtatcagagagcagtatcatttttttagccgctgggaagttttttttggtcgcaagacgaagctaggtgttttttccaatcaacactactcctgaatcgccatgccccgcaaggcgattgactcgcggattcccgctcttattcggaatggtgtgcaggagaagaagcgcagcttcttcgtggttgttggcgaccatgccaaagatgtgatcgtgcatcttcactatatcatgtccagcgtggacgtgaagcagaacaaatcagtactttgggcgtacaagaaagaccttcttggctttacgagtcaccggaagaagcgcgaaatgaagattaagaaggaggtcaagcgtggcattcgcgaaccgaaccaagaagacccattcgaacttttcatcaccctcaaccagatccgctatgtatactacaaggaaaccgagaagattttgggtaacacctatggcatgtgtgtgttacaggacttcgaggccatgactcccaatttgcttgcacgaaccgtcgagaccgtcgagggtggaggtttggtcatcctgcttttgaagagcatgaccagtttgaagcaactttataccatgtccatggatattcactcgcgataccgaacagaagcacacgatgatgttgtagctcgattcaacgagcgattcatcctgtccctcggaagctgcgattcgtgtctggtggtcgacgacgagttgaacgtgttgcccatctccggcggcaagaccgtgaagcccctcccggcccccgaaacaacggacgagtcagcttttggcacgaagaaggaattgaaggaaatcaaggagagcttggcagactcgaagcccgtgggccctctgctcaacttggctcgcaccgtggatcaagcgaaggcgcttctgacctttgttgatgcaatcgctgaaaagacgctgaagagcactgttacactgactgccggtcgtggacgaggaaagtccgccgctctcggtgtcgccatcgccgcggctgtcgctcacggctacagcaacatcttcatcacttctcccagtccagagaacttgaagacactcttcgagttcattttcaagggctttgatgcacttggatatctcgaccatgttgactacaccatcttgcagtcgacaaatcccgacttcaacaaggctgtcgtgcgcgtgaacattcaccgcaatcaccgtcaaaccatccagtacatccagcctcaggatgcgcaagtcttaggacaggcagagcttctcgttatcgatgaggctgcagctatccctctaccattggtgcgcaagctgatggggccttacctggtgttcatgtcctccactattaatggatacgaaggtacgggccggtccctatctctgaagttgattcagcaactgcgggaacaatctcgaagtggagtcaagacagacgacaccgacgtcgccgaccgcagcacaggcaagtcagccaagggtgccgacaagaacctgagcggccgaaccttgagagaaatcactcttacagagcccattcgatatgccccaggtgattctgtcgagaaatggctgaataaggtcctctgccttgacgcaactcttcccaagtcgcacatgaacacacaaggctgccctcacccctcgcagtgccagctgcttcaggtcaaccgtgataccctattctccttccaccctgtctccgagaagttcttgcagcagatgatggcgctctatgttgccagtcattacaagaacacacctaacgaccttcagcttatgagtgacgcacccgctcatcaactctatgtgctcgtcccgcctattgatgagggggccaccaagcttcccgagccactttgcgtcattcaggtcgctctcgagggtcgcatcagtcgccaaagtgttctcaacagtttgagccgtggccagcgtgcaggaggtgatctcattccctggttggtcagccagcagttccaggatgagaacttcgccagtctctcgggtgctcgtgttgtccgtatagcgactaaccccgagtatgtgggtatgggatacggttcccgagctatggagcttctggtcgacttcttcgagggcaagttcaccaatttggaggaggaggccactaccgccgaagagcaaatggtccgtgttacggacgaagagctcgccggttctagcctcttggatgacaacgtccatgtccgagacattcgctccatgcccccgctattcggcaagctgaccgaacgtcgccctgatgtccttgactacattggtgtcagctacggtcttaccccatccctccacaagttctggaagcgcggttcttttgtcccggtgtatcttcgtcagacccccaacgatctcacaggagagcactcttgcgtgatggttcgcaccctctccactggcgagactgacgacgcctggttgagcgcctacgcgcgcgacttccacaagcgattcctctctctgatgtcctaccaattcgggcagttcccgtctgtcctctccctcagcatctgcgagtctgccaactccggtgccaagaaggacccgaagtttaagccgcgcgtgctacagaaatccgacctcgatgccgctttctcgccctttgatctcaagcgtctggatagctacgccaacaacctcttagactaccacgtcatcctggacctggtccctactctctccgactactactttggaaaccgtctcgatggcaaggtcagcctctccggcgtgcagcaatccattctcctcgccatcggtttgcagcacaagaacctcgacgaccttgagaaggagctgaacctcccctcctcccagctccttgctatgttcctcaagattgtccgcaagatttccacccacttccgcaatctcatcgagaacgatatcgagcaatctctgcccgcacagaaggttcgtatcgagacctctgccgctcacgacgatgagcccgaagtcaaccttcagcctctgcccatcagtctggaggatgagcttcttgaaggaggtaaacagatcgataaggagatgctcgccaaacagcgcgctctgagcgcatctaatccgtaagttttaatcgctttgtctgcctatcgaaacaacaataactgatttccagcccacagtgatggacctgacagttccaagtcctctaagcgcaagaaggtcgagactgcgcgcgatatatacgacaaggagattgactcgaagagacaaaagatgatcaagaagggcaccgagggccgcaaaaagcgctgaattatttgggttctgaccagttttctttttgcattaatgtacggtgttcggtttcttgggtctaaaaagacttgcttgtgtctagtatttgtctgtattcttcaaggttcatgttttcacaggatatccgtctcttgtacatacatatgaatcatgtttattatgcctacaatgagttgattgttcctagagatagacgtaatattccttaaccgcttgatacataagcttatgcgattcgctctcaaatttttgaatactagatagaggtcatcagactagcattgaccacttccggggactgagataatcacagctcatcatgctccacggcctgttcgtcggcctcaggcttaggttcagcatcagcttcgactgtctcagcatcaggttcaacctcagcttccgcctcaggcttaacctcagcctcatcactgaccacaataccctcaggcaacttctctttagcaccctcacccaaccgaatggcatcaacccaagactcaatagcgacagccccaaagtccgcatcggcgccactgaaccgacgccaccatccgcgacgcgcattcaacgcgataatttcaaccgtctggccgtcagctaacgccaatgcctcacgcagagtcttagacctggtgttgatagcagggacggcatagagcgggaagaggtgcgttccgcgctgggcgtgcttgtgaccgatctcagctaggcttgcgagcgcctcggtggcaggcgctggaagcgcggcgtcaggctcgctcgcctcagggagaatgactagcacacaggtgccggactttgatgcgagacaggctgagtcgagggattcgggggtagagagggttggaattgggggtgcggggatagggacttgaatcggcttggcggaggggtctgttgtgtcctggttctcggaggcggtgggtttgaggtcctcggcatcgtcgacgatggaggtaggcttggaagcgggcttggacttcggtttcgacttgggcttggagtcggacgcggagcggggggacgcgtcggggttgggtgttgccgcttggctcaggaattctgtgattggcttcttcttcaagtcgccggtgtagattttgtgctcagtatcagcgctggggacgaggacaagcgtcgggaactcggttacgccgaacttcttcacggaggcggattctttgttccgtacttgggcgatgtcaattgcaccgaggaagtcaactgccagagcacggatcagagcaccagttgtacccttctctgtgaagaggatggccttgggccggtcctcgttttgtccaagccatttgtccaagtccttgtctgttgcgcgcttcacgtggttggggatgcggtcgacgactgcgtcgacgatacctttcgcgctgcgcgcaccttggtagtcctcaacacggggcttcccgggcttcttggaaggtgtcactattttcaaggtcgggaagccctggacacccatctgtccgcagaaggctttgttttcgtcatcgtcgcagttgatcgcggcgacttttgcgagtccgtcaaggtttttcgcggctttttcgaatgcgggtttgaggttcttgcaatggccgcaccaaggcgcgtagaatctaagtggaaaaggtgagtgaaggtcggagggtggaggcagagagctagatagcttgagtgcgggagaagcttactcgacgatctatgcaactattagtcgattttgcgcatttaggaagaccataggcactcaccgaggtataattcgaatttgcaataagcgagttgtaggttttaggattcaactggatcaccggcgaattcttggtgtatagtccatcggcgttaacaggcaatgccgcaaggagcgacgtgacaagcaaaagactggcactgtgcagcataattggtgatttggcagcaggtatgaaactcagcaaagaagccaaagaagccaaagaggaataaagaaaagacagatggtccgaagtattaacgcaaggtgtcctgaagctcttggcatgcggaggattactaggtactccgtcctgaagatattcgagtagcaaatatctcactcaatatgcatgctgtatatatatcttgaattagtgtaatgatgtttcccatctcacattaactaggtcttcacgctgtttaaatgattccttcgattggcatccggtggacttgtacagaatcgtctccataagttccgagttccctttctcttcaataaacacaacctagcaatggctagaccaaaagagagccatggcctggccttcctaccccgcgaactcttctggatgattctaggctacttagaaccaaatgaactggtccgctgtcgccgcgtctcacgtgcctggaacgaagcctttagcaacccggccatcctactcgcactcctgaggaaacatttcccatggacaaaagaagtcaaaactttgagccaagagacatctcctgaagaacaagaacaaggtcgtcgtcttttcgaccaggttgcatcacgatacgactacctaaaacgaggaaaaccccgctctatccagaagtaccgcctctgcgatgactttggtggctctggagaccgtgaatggtatcaggtgcagccatgggagtcacacgccagtcatatgaggcgcttcattgaccgccagttctctgaggctttgtggactttcgaggatggcctgctagtctaccccagcgccgatcatcaattcctcgtgctcatggatttggaaacggaccggcagttcatggtaccgttcattattcgtggcaaaattgttcgtcgagtgcggctacagaagagcttgctcgtcgttgagtgggctgaaccaaaggcctttcactggctgaacgatagtgatggcgtgcatcgtcactttgcgtcttcctttgatgtgacgaggggtgaggaccagggctggaatattgtcccgcgcaatgaatggaagattatgtttttagggcatccgctgagcgagcgagatcggttcttctcctcgcatagcaacactcactatgtcatttatatatggcagccaaatcgcagcttgtataccgccgacgaagatgcacccattgagtctttgtttgtctgggacatatcgaaaccatcatcatatcgaccttcattggatcccactggacggctgagagacgactcacctgactctccatcaatcgtggcacgattcggattccgagacctggagttcttcgatatccggcaacgaggctgtccaagcattcaacgattggagattacggttgattcacaggcggtcgaaattacagaaaacgtttgcatctggccggaagacgaagcaccggagccatttggctttcctcggcctattactacaagcattcctctggtcggaaatgggcctcatcggcgccgggattttgacggaattctaccgccttaccgtgggaactgcagcatgctggcagagagtatgaggctagatgggtgcattatgacggacccttggtttggtgttattgctcacgtggctatactcgagcctgatcttggcttttgtcttcacttcgatccttggacgtgggtccaagatcagactatctatttgactatccagacacctcgctcgagcgtcacttgtgacaattgggatttcgtcggtagaggaaagctcgctggtagtgagaaatatctggtgggcgagaattgcaatcgagagctagtgatttaccggtttgatagatgaattgaaggacaagcggactgggccacttctgcggcctttctccttcacgacgcaatgaccctacaaatccgatgatataagaaacgttatatataagagcatacagacgtgattttggaagttctttttagatgtctttagatgcagtacagtgacttttctatatataaccagggattggttttcgtcaattcacctctgctttctcaaaggctatattgatctccttgcgtatctatcatatacctctctcactatttcgtcggtttaatggcaaccgtactgaaccgaattttacaccgtaccaatctatgggtactaggtagaggaagcgattatttatgacacagttgtcttcctctccttattatacaacagctggacgcaatacccaagaagtgcaaagaatttgagctagcctaggggatacacggcctcaatgctatggaatcatagatttgggtatgaacttgtccctgattctggggtttctggtatccatcacgggctatccagcgtcaccgaccaaaaccgcacctcgcacccgagttaatggccattggtggatatggagtgtttcaaacgagagaacgaaggaattaagtgactaaaaagtaatttatatacctttatttcggtcaaatcaagcacacaaagacggaagattcgttttgtgtgatggcgcgtagggtagaattagaagccgaagtgaatatacaggcaaatcagttacgtaccaaaaaaaagataggtgcatgagaaggaagtggtcgtttggtcaggattcaataaactcgattgattatcgggtgcgtagtcggccatgatattggctatgatctcttttttttttctttttgcagtttagacaaaaaatgaagattgaaaagtctcttcctcccaccacccccgggagaccgaacaaacaaaagagaaaaggaaatgtgacccaacatggatcaatcactgctcctgcgtaacagactccaatagaaagccgtagctcgtgaacttgcatctgacacaggccttgatgccacagccagggcaggtgagggtgaatgaaggcatccacaagttgcaatcactgcacatgggacggcagaagtccttgtaccataacccaaggtgggagcaaaagctgggatcgttcccaattgtaataggcgaggcgttcgggactgaaagacgaacttcttccaaccatccacaatagatctccagcataaggccattaagttcaccagcaagatcgttgggggtgtagcgtccatgggggtccgcgagcttttgctcgaggaatgagattagagggagcaacgaatcatggcccaccatgtaggagttgatcagtttgtcaacatcaaaattggaatcgtcagtggcagattcgggatcgtcggtgggagattcgaaatcctcaacggtggccttgaaattcgagtgcttgttgggtgagtcagtgaagctggtggagttgctaattgttgagaagccaaagggcgaatcggtgaagttgctggagttgctacttgttgagaggccaaagggcgaatcattgttagcaacagaagcacaatcagagtgaattggatactcgtcataggaacggagctttctggagtattcgtaggcaaacgtgtcaaatgtgtcggcaggattgcaggtcttgatgttcttctcaggcaggagatgcaccaaattatgctcgtagccaaattcgagatcgtctaaagctccttcgataacattatcaacggtatcggcaaatttggtatctccatcgtgatccttcgccatatctgctagatcacgtttcattcgagcccgcatgttttccctgcggagctctgcccgtgccttctgcacttcgggatcaatgccagcccattcgttctcccactggacattctctgcttcaaattgtgcccgtctcgccttggattcggctgactctgggtccatgtgcacacttgttccgtaactgtagtagtaggtatggctgtgctgacgtcgatcccttggcttgtgtttcgatgctggctcgctacattggcttggccagttggactcgtatccatggcgttctcgctttggcggacgattgtagttgcccttgtaagcccatgttggtgtttcatcctcgggggctagatgtctcttggccttcttttgcagggcctcatcaagtaagcgtcgacggtcttcgtcacggagaatctcgacagcatcttgaatctgtttttaatggcttgtcagcgatattcaacaacttcgtatggcattatcttggtgttgtagacatacttttctgaatctctcaatggtcgttgcagagtttccagccttgtctggatggagcttcaaggcaagacgcttgtaagcaatgttaatgtcagggagtttggcatgtcgctcaactcctaggatagcgtaggcatcaacgatcacagtggcagttgacatgtttgcggtcactagtggatgtcagtgttgtgttatatgtgtgagttggcttgagattaaatggtcgttgccagtctttggataggcagatggaataagagagacagagagagtaatgtgaaataaatatgaaggagtgtgagcaatcagaacatgctagtgaggaaagtgtgggaaactgttgggatgacaatgactatatcaaaactcacctaggcaccgcccaaacgtaaggagtcaaattagaaagaagggtcaccgtagcgactcgagaaaagagggagatgaatgatgtaacagagaagacgacgagactggagatgagaatgaggatagggaaagaacaagagtagcactggaggaagctgaacaagaggggaatagagaacaaagacgcaaaaaggatctttagagattcgagaacagaaggatcaagaaaggacgaagagagagggaaagaaggaaggatgagaattagggtataagtatgagggcgagggatgcgggaatcctatttaagtagataatcctattgtaaaccgaatcctattgatgagtgggagctatttatcgcttcatcctataatcgcattgaagaacaaagaaactgacctagtctccagggttagggctatacacaaacaatgcaatcgcacgtggctataaatcagatggttcctgttgaatggattaggttagggctagcaaaatctgtacatatgaaatggaaataaattgactctgattttacacaagctgaaggtcgatctaaatatgaacaagtctacactaaaggcgacttggtcctgtaaaagaaagcttctacatatcctcactggcagtggcaccggtgataatctcaaccagctcgccggtaatggtggcctggcgctgacggttgtacaagatctggaacctggaaagctattagagacgaatcttgaaaacattggaggtaaaacatacttgttgatcatctcaccagcgttcttggaggcgttctccatggcgttgcgacgagcggagatctcgcaggcgtggccttcagccatggcccagaagaggttgttggccagagcgtactcgcggaggctgctcagaacctgatcgtcaacctcgtaagaagagatgttggctacattggatgttagttgaaacttgatgaactgctcgggcgtaatgaagtctcaccggactgagtgatagcctcctcggagtaggcctcgagagtgatgggctcgtagctctgagcgttaacgaaagtgttgtagatgatacgaacgctggcgtagtcctcgggcaggagagcgatctggtcggcaatggcctgggcatcggcgaaggtggggatgtccttgcagacgttggagaagctcaagacgatgttctcgggggcggcacgggacagcgaagccttggccttctcaccgagaataacaacgtcggcgttggggatatcggccaaaatacggcgggtggccttgctcagaccggagtggataccaccgcaaagacccttgtcggagctggcaacaaccagaagaaccttcttgtcctccagaggcttggtctcggcctgctcgaacaaggtgttggaggtcttaccgtagacgcgggattcatccatagccttctgggcacgggtgagacgagtggacgcgacaatcttcatggtgttggtgatcttctcaatgttcttgatggacttgagacgaccctcaatctcacgcagagtcgcgaaggtggcggcattggcgggggcagggcttgatttcgcagtcagcaattgtcgttctcaactcctctgacatccagcgtattttccactgtcaatggtgtcgaggtcgttgcgtcggagtacgtcgggtggaaggactttagcacgaggtatcggatgagaacttaccgagcgacggcggcaccaccagcccgcagggccgggcggacggcacgggagaacattatgcgagagatttaaagaggaaaaggaacgagcagatggtgactgcgaagaggaggggagtgacgaaggttagacgggaatgcctcgctggtcgggaaggaagttgagaaccagggaggttctgtctccgtgctgccgctaaactagaaagggcaagcatctacggtgcgccattccgactttcaccgcagttgtgcctcaggcatttagtatttacataacatcacttgacgcctcaggcatctcacttgtagtccttagggcctcttttcccattgcattcctccattccaattccccccaacttgtttctctcttttctcgcctcttctcacctgtcttctctgttcctctggattcacccgcaacaatcctctttacgcatgtatcattgatgcagcagatcttataaccatattcttactcttcattggtcagaatttccttgctttcctccttctaccaggcgtctcgatttgcccgactcggcgcacgaggacgcctcccctcaccaaagcaccgatttctctcattttaccctcatttccggcttgctagtccaggggctatcatcatgagctcctcggaggacgacgcaccccttatgcgcgccaatggccgtggtaaaggtgcgttcctcgggttattcggctgcacatctacaatttgtcgcaaaccttcgctctccttgcactttgtcttctcacttctatatctctactttgtacacaatcgcacttttctcatagatcagttctcgatggtgcatctcacactttgacgtcattttcttcacactttgaacatacctcgaacagcattctaacatagcgtttcctgcacttctagtttcttcaaagtctcccgaaaccgtcagaatggcggattccgcccctgccacaaatggccatgttgatcctggaatatccattcgattcggtcctgtggaagacaaggatgtgaagatggaagatgaggaagatgtgctgggtgccggtaagcgcaagtctcggaccagtgtgggcgaaaagaagtcctatgcagaagcagaaagtagcgaagaagatgagcctttggtacgcctatccccatttcgggatgaccttagttattcccggtgcgaccatactgttgctttcggctgaagcgtctgacaattcgacagagcaaacgccgacgcacacatgtgaagcatgaagaccccgagaccgatgacgatgtacccttgggacgcaacggacgcaaacttcccaacgccgccgaaacatccatcggggatgagtctgattccgacgtccccattgaacggaagcttgctgcgcaaaagagaaagattgaacaaactgcggagaaggtggccaaaccttcgcgcaaacctgctgcaccaaagaaagaggctaagcctgcggcggccaagaaacagacaaacggagtcaagaaagagccggccgccagcaaagctgcccccaagaaggtgaaggctgaacctgcaaagaagggcaaagccaaggtgaagtcggaaagccaggacgcggaagaaagggaggcggaggaagaggaggagaatgagtaccgctggtgggaagaccatagcaagggtgatggaaccatcaagtggacaactcttgaacataatggcgtcgtgttccctcccgaatacgaactgctgcctcaaaatgtcaagatgaaatatgacggtgttccggtctctcttgcacccgaagccgaggaggttgctagcttcttcggaaccatgcttaactcgacccacaacgtggaaaaccctgtgtttcagaagaatttcttcggtgacttcaaggaggtcatcaagaaaagcggcggagcgaaggattccaagggcaacaagatcgacatcaaggagtttgcgaaatgtgatttcaagcctatcttcgaattttacgaggctcagcgtgatgaaaagagacatctgccaccagcggagaagaaggctgccaaggctttgaaagatgagcaagaagctccctaccaattctgtgtgtgggacggtcgcaagcagaaggtgggcaacttccgtgtggaaccaccttctctgttccggggccgtggtgagcatccaaagaccgggcgtgtcaagacgcgtgtgcaacctgagcaaatcaccatcaatatcggcaaagatgcgaaggtcccgccgccacctccaggccacaagtggaaggaggtgaagcacgatcaggagggcacctggcttgccatgtggcaggaaaatatcaatggcaactacaagtacgtcatgttagccgccaattccgatgtcaagggccaaagcgattttaagaaattcgagaaagcccgtgaactcaaaaagcacattgagaaaatccgcaaggattatcagaagaacctcaaacatgatatgatggtggaacgacagaaggccacggcagtctatcttatcgatcagtttgccctgcgtgctggaaatgagaaaggtgaagacgaagccgaaaccgtcggttgctgttctctgaagtatgagaatgttaccctgaagcccccaaacactgttatctttgatttcttgggtaaggatagtattcggttctacgatgaagtgcaggtcgatctgcaagtcttcaagaacctgaagatcttcaaaaaggcacccaagaagaacggtgatgaaatctttgaccgccttacggtatgccctccctttttcttgcagtcttgaatgttactgacgaaaaaagacttctgctctcaataaacatcttgccaactacatgcaaggtctaactgccaaggttttccgtacctacaacgcatcttacaccatgggttgtgttctcaacgagatgaatgctagcggtggtactatcgccgaaaaagtgaaagcatacaatgatgccaaccgtaaggttgccatcttgtgtaaccacaagcgcactgtcactgctggccatgcgaatgcaatggaaaaaatgggtgaacgagtgggttttcctcattccgccctcatggcgagagtcacaatactgatatatgttttaccacacagatcaagggccttcgataccagaagtggcggctgaagcagcaaatgcttgacttggatccaactttgaagaaaaagaagggcgcggcgttcttcgagatcgatgaggatctcgaccaagaatggatcgaagaacaccaagccttcttgatcgaggagcagagaactaaaatcaacaaaaagttcgagaaggagaatgaaaagcgcgttgctgatggtgagaaggaaatgaaggcttccgagctcgaggagcgtctgcaggctatcaaggagatggagaagaagttcaagagggagaacaaaaccggcaaggtcgaggccgaggccagaggcgcaacgattgaaaagctcgaaggtgccatcaccaagatcgaccagcgggtcgaaacaatgtccgtccaagctcaggacaaggaagacaataaggaggttgccctaggtacctcgaagattgtgagttcttctgttctgatttttacaatatcaccagctaattactcccattagaactacattgatcctcgcctcacggtcgtcttcagcaagaaatatgacgtgcccatcgaaaagttcttctctaaggcgctgcgtgagaagttcgaatgggccatcaagtctgttgaggaggaatgggaattttagtctaccgctcgtcgccttgattacttgcgatctccgtctttctcgcacattactttcttcgtactatattttcggttccacctagtttgccttggtcagacgatatgactttcgtttgtttgtcaagcgactctttcaactctaccaattgatctattcggatctttggttgcattggggtgcttggggaagaattgacgctgccattggctttttcatgattttcgttacagagaggcttggctcagagtacaagcctacgttattggtggtcgtgggtacgatatgatcggtatacgccagtatgcacgagggaaaaaaaaaacacaaaaaaaacacatcagaaaaggactcatcgattcggttggctgcatgacttggttaaatgcacacacactcatagcagttgggcaccttgcacagtttctgtcccgctgctctttgtcatttcggtcataggtcaaaaatttcgaatacttcaattcaatcgtttcttttccaatttagcataagctattgtttccctccactcgtagtccaacgtagtagttgcccggtgacatgtaactaggcttgtaacgtagttcttatgtctgagttgtggatatgtcctctgtggaacctgcacaacatatctgcagggtctatgcataatgcatgacatgaacgagactagcgctgtgtgtgattcaaaggtacaactttgcaggttgtatgtggttgatgtctaaaacatacacatcaaaagtatacaagggaacgttgatttgagatgcagatagaatatcagagaaatggaggaagggctcaatatgctgccaatgcagggccatgcaaaaggtaagaatgagggaagaaatcgaaatcgaaacatatatgcagaagacaagagaaaccccccccctcccccccatataatagcgattatcaattacagtacaaggtcgattcacatctagcgatgctagacaggtctgtctggataaatagcttcagaggtaggaggagagagagaggagagtagaggtggacaggagagcgtatggagatgcagatcatgaaagggtcgtgtcgtaggggattcaatgcaacctttttcggacacaatgcgatgagatgaccgatttcctcatcgggtagtggagaccgttaatgaatcatggtgggggatagaaagagtaaaataaccgacggacgggatatcttgaaaaagaaaaaaaaaacgacgaaagaaaagacaaaagatccgaaaactattcgaatcctctctcaacatggccaccagcccatgcgcttatagctgtccacaatttcgcggatgctgtcagccccgaagttcgggtacaatggcttccagccagtctctttctcgaacaatgacccgtcaacgcacatatcctggtccctgagaatatcacgctccaagaacgggctgatcggtcccggtcgcgtgatatttgccctctcgacgagctcagcccaagtctgcagaccgacttcattcatgtcatcgaggacatcgtcgaggttcagcttggcgatctgcgaggcaagcgacccgatgaacgagaccttgaggccgaacacctccgtcaaggccttggcgacgtgttcttgtttcgtgtcgttgtgatcgacaatgttgaaggcaacaaccccgtccttggggtcgatgaaacccttggaggcgcgccacttggcagcctcgaacagcgcgctagcggcgtccttgacgtgcagggtgttaattttcaagtcctttgtgtgcagaagttccagatcctgcttgagatcaacgtggacggcggacagacaaatgcctgtggcgaagtagcccgggtcgtaggcgccatacacgtggggcaggcgtaccgcgcagtactgcaggtttgggattttccgcagttcatccgcggccttgagcctccatgcggccagcttgtgccacggaacgagcttgtcggtctccttgcgtggcgttgagccgcccttgtagacatgcgcggtcgaggtctcgatgaaggcggggatgccgcgtcgggcaatttccttgccgagcgcgactgtcaggccgtagctgcgcacttcgtagacatcgtcgggttgggagtggcgtgtttcgccgccgcagttgaacacatagtcgaattgttcgccattggctcggtcgaatatgcgcgggaaatgttctgtgggagaaccggccttgaggtaagaatttgctacggggtgagggacttagcgccgggccactcacgttcacggctggcatctgcctggacaaacttgtccttggagcatgcctcttcgaattctggggccaaccaagccaattgtggcagaactttgtctaccaaacggacttccgaggctaggttattctcgtggatgtatagcgcgaggtgtcgaccgatgaagcctaaagacggggagtgtcagttgggagggaatcctctttttgaagacaaaaaaaaaaacataccgaggccaccgacaatcagcacggcgggtttttttgcttcagccatttggaatgtgaaagataaaaaagcctccccgcaggttcaggaggatgaaaggggggaaaggcgaaggacgggagaaaggaggggggcggactaaacgggcaaaggggaacaactaaaaagaaacagaaactcagaaaagaatccgaagaatattatttgatggaataagaggaaaaggaaaaaaaccccaaaatttcattattcgggattcgcattctcccctgccaagccggttaatccacgacgttgactacggagtatagcgagtgggttacagtggaaacaccagcatctacctgtgacgtcggaggggagatagtccgtcttagtgagattagtgcgaggggacaattccacttcttttaattatacagagactaatgtgcacagtaggttgtaccatgtgaatttgtatgtagtcctactacttactactccgtatacttcgtacatatataggtaaatccatacatccctgtgttcgttggtcccatggtactgggtttccgatcagccgaaccataaatgtgaatgctaagcctctcccatgcttaattcgactcaatatccaattgggttggtttcggctattgcaggattttcgactgagctttggcttaaaataaatacgtacaaatgttacatagagtcattggaagcaatttcggcatattcgggatattcgcctttggaaattgcagtcgtacatagtgttcttcgagatgaacaattcgaatagtttggtcgaaacttcaccagaatcggccttcggacacacaaccaagaagggaggggacaagaggacaagagcggggcactggcacttgtcaacgggcgcagggcgatcttgtgggcacggcacacaatcgaacagcaaggaaacggttagaagaggggtgagcggctaggtaaggggcttgctcacccgtgtccaactccatagagtctgctttagaggcctgaaaaacatatggaacaaaatgtaacttaaattagagggatgtggtgatatcggaaagatgttggcagattcttcaagaacgggtctggtctgtgccttctcgaatcatatcgcatgctaggaccctcatgctgatagccacatctcgtggtctgtagaacagagataaaattcgtgataacaacataaatttagctaatatagtggagccgcattgtaaagtttgatataagcctcgaaaattctagaaggaaacctcgctacggcattccgaatttatatggcctctttcatgattagcgacctccaaagcccgcttgtcgtgactacaaaatacgtcgactggaatcgaagctaagcatatagaaagcgagagtgtacagttgtgatgtatatatcttgacaggcataagagataacgtaatgtaatggtattaaatctcgttgtctagcgagaagtcggacactgttcttctatgtttttgaatatctttcgctcatgggttctaggaaagcgaccgatggaccatgggttgagttgaacaagccaattgccttcacaggttagtagtctactatgtttgctcataagcgtcgagggtgtgggaagcgtattctcggcttgttgctagtcgtgcagcttagcagtcctagctaacacgcattataatgttgttaataattaaggacgatggtcataaggttgatcactcggcatgtcgtaggtttggtatacacaaagggtgttgtacattggagtatctggatggtcgaagggagctaacacattctcattggtagatgagtatatccctcctacaatcaagtcgcaaccaagggattcggacattcttttaaatgcactaaaacatagatcatatcggcagcgtaaacctaaccactaccagggtccagcaatttctatgtaagatctctcagcctttgatttatacgaatgtggaattggctcatggttgatcactaagaaagagtaacattggaatataggtaggcctaactattgtctcccggcatgctacataggtatcaaacctcttgccttgaatcttggaacggtggagtcggaaagtggggccgatcttgtaccttacagacatgacctattcaatcacatagacgtaattataggttgaacaccttttccatacatatgtatgtaattattcacttttaatgatgagtaaggtaatattgcaggtatctatccgagcctatattctcgttataaaattatgccacattaaatttcctagcgggacgtcggaaggacgctcgagatgaataaacacgaacaaaagatagattcatcttggatacgaatcatgaacacgaaagagttccactcaaagccaatacatttcataatagccaaagtaagatatgttcatactgcaaaagcaagattgagatcacacaagcccataggatcatgatgcgcctagacacttcagcgagtttctgagctccttgatagcggtgtcaacatcgtcgaaagtcagagcagagaccgcccaacgagcatgtttctgcgccaactgcacagtgctatcgtctaggccatgtgatggttgggacgggaaatagggagccgaggcaaccgggacgctcgcagctgagggtggaacatatgtcggagcagcgggaggctggataggagcactagcacctgaagtattgtagaaagaagccgggtccggagtggatacagatggatcctcgggtggcggaggaaaggactggaatgcagtcggggtatctggaagcttaggtaccgaggacgaaccgccgatggtcgctggggttgatgggagctctaatccgcctgtgttgggatcggcatccgctggctgcggaggatacccaggtgcgttgcgaggaacagaagggatctcaggcggaggacgaggtgttgacgatgtccgtgatggatgaagcgactcatcgagagttgatttccgagccagctctcgtccaagacggtcagactcgtctgggatctcttcgatggaggcttgtcctggcttggaggcctgttccgctaccgactcgtcaaaagcctcaacatcaggatcgttgactagttcttcttcctgctttggcgcgggatttgtcacgttgggatcttcaccggctttgaaagcctttacaatccgaaccgcgtggaatttggcgaatttgatccgcccagcaagttctgggtctaaggggccccagattgaacaaagttcaaggaacgtagccgctgcctggaaagtatctgccgtctgcctttttggcgattagtcatttatagcccaaagtatcacacgtggagctcactttgtgactttgttagcgttcatagcggcctcagcacggctgaagacctccaacccaaattgctcgacataggcactcgccgcaacagtgtctgtcactgtatcattgtctgggttttctactttgaactatttcatgccaatatgatcagctgctagatctcaaccacgggatgcggaatagagactagtgtggggagcacgactcacttgttccagcttgtccacgaggcttgtcgtgtagagtttgatcgcatcatcggaattgtgaagacccctttcgataatctggttcacaatatgaaaattgcctatataatagggttcaatcagctcaaatgttcagttgcgctctgcgcggggtcttgcgactcacaccaataggcaatcacaggtttggcattctcgatctgagctgccctgattgcaaatcgcccaatatctgccgatcggagtccagctggtatattactcgtcatggttcaggatttttgtgatgttaaggagaagatgcatgtagtgaacaaatgacgtttggagctcgcggagtttccaccgcccgtgcgggggcctatgtaggggcccttatcggatcttatctactatgcggaccttatctaccacgatttgaagatctatgaaattgcgaaactatttcatgatatatttgtccgactgtactgggtatcattcatcttcattcgtccacttgccaatctccactctctcctcggccaatgcttccacttcaaaatgatcctccacctgccctcctggacccccgatgcgctcaataacaatccacacacagcgtgactcggcattgggtagcaaatcgaaatcatcgattcgtaccccggacgcagcatcgctgtgagttccatcctctgacgtggccagtatctccttatatggcccctgacccagctccacggtcatcaacacaggagatggagcaacagcgcgagagccgatcgtggaccgcttattcctcgcaataagtcggatgcgtgtcaaacgggagacctgtagcgaggccagcatccggtccttacccggagataaaacacccacttcggatagtacggcgcgccgcccagcagactcggaaaccaagggctggactacacacgggatcgtggatgagatccataacgtgaaacggccaagctggtcaggtgcaaaggtagagcagataatggtgtaggtgcctctgtccaagcatctagtctcggccagtgcgcatccgcgacggtactcgccactatctgcaatgatgtctcggcttcgcacgcgcgatatgcgctgcccgtttgaccaaaatatttttacgtgggtcgctagctccgcttcagtggtctcgaccaatatcgagatatctgtcggttcagaaattcgtatactgaattgtggattggagtggtatcgaggtgactcggcattcccgccagctgtcattgttgtccaggaaccacttgccttggtcaagcatagatatttatctagcgatcgtgccacggccacaggagcggttgaaaatgcagagagagtgaaattctgggtagatgatgggagtgattgctgtgagaccactgcggtgtaggttgacttgggaggcatttccagcctcataagcgtgttcggagagtccacgtatggtccacgatggagcgcaccgtcattgagagacactctgcggccatctgcttgaaatatgtagatgctgataaagcccgttccattctccgatcccccagaactaaattgttgctggtttgtcttaaaatgtttcccaagcagcagccagaccgttcctccatcactggagatggagaattggggattcttcacgaagcagccggtcataacttgaccgtgcgacaaatcccaagtaaaatgaatgtcctcgcggtatttgaacaaaccaggattccagttaaggtaaaggttctcgaaattttggagaacttgttcacaatccatccaaaacgtccctggggaaaggggaggtttatcatttaggctgagtgagccgagatcagccgtaaggctgctttgtatgtggggttctgcaccggcccacgggttcttcaaaagaaaccgacgacgaccctggacttcctttaagtccaagatagcataatcgtgctcgcccaccagccccaggccttgttgttctcgttcagtcagcttcccagtgccgatagtcaaaactacatcgccatgtgagaaggcactgtataaacgtccccaaatctcatcggaggtcaaatcgtcgtggtgtaaacagacttgttccgggatccaaccagtaagcacccaaaggtcggtccctgagttacttcctgggaagtcatagcctccacggaccttcaagtaggccttctccacaagagcaggccacaaaaaattcgagttattgcgatcgattacgtggagtgagcgtgtagtctttgacgatggcaatcgatcatctatcactaccttccggaaagatccgttgaagtagaaccgaaatatgtacttcccagaatgcgaaagtatcgggttcctatcctcactgcacgggtacaatgtcggtgatgcatgctgctcggattagcttttcaagattcctcgacgtgggatcaagtaagtccatacctgccctagacctcgttccgatcgagatgttgtggcacagaggctcgcgaccactgagcaatctgtcaagacatcctgcacgagatctgtttgttttgaagtcgacatagctggttcaattgcatcatgtacctgattggccgcgttatttgttcgtagcagatcgtgcggccgtttccagcccgcgaaaatttctctctggcattcagagaggtgcaaatcaggcgcatccctatacccggttagaatagatcagcattgggccatcttctcgacatacgtaaaaggctgccctttgaatacaaactcatcctgaagcggggcgcgactccatggtggaaagatgtagccattaagtttggcgccctcgaggataatgatttcttcacgggtggtgagcttccgcgtggatgccggcggccgtaggctggggaaggctttctggggccccgcacgagcagccgactgccagtcagcagcagccttgatcttctcagctttggacagcaattccttgcattttttatctagttgttttttatcctcggcgggcgccaagcgcaacgctttcatgtaatgctccgcggcattgatggctgcctccaatgccgctttctgggaggtcgctgtggctactgcctcttcagcgctctatcaagtcattagcttccttcaggtataattgagaaacataattcggtaccaatgcttgagatatgtaggactgtgtgggagcaggtctagacatacttgcgttgaccggtcgtggggtatccaggtaatcagatcgaacagcaagtaaattaccggattaggctgagccgagagggccctttacagattgtgaaatattccgcgacttactattgtagagatcgatacatttggtaataattggtatattgagaatactgtacacaatataatgaaaattatcccatcaagcacatatttagttagttaactctgtaaagtgaagtgaagtcatgacataagcccataccgacctcaccccgaagtggacctcggcttgttttttaggtgatagcgccgaggtgcatttgtgaattcccgcatgagctcggtctctctttttttttatggttcgggtgacttcggtatgatcatcgtctctatccatttccccattgtgctttctcctcaatctcaccttctccgttgttcggagccaagctgtgtcgagccccgctcaatatttctcgtgtcgcccggccgctaagagaagcgagccctctccctatatcatattcttaatcgtcgcgttcatttgatttcgaataccctaaaccgacattatgactggtcaatccaaacctgtgctgtcgccatggggcagcgccgtggcgggtgcgacaggcgccgtcctcgcgaacgcgatggtgtacccgcttgacttgtgaggtcccagataaaacagtcctcaaattatcagatcaaatctcgctgactctatcgctcttcatcctgtagagtcaagacaaaactacaagtacaagtcaaggagaagaatgcatccgtgcaagccgacgatgtcgaacattatgaatccaccatggatgccatcaccaaaatcgtggggaaagagggctatagtggtctgtactccggaatggttggagcccttctaggtgtcgcctcaacaaacttcgcatacttctattggtacagcgtcgtaagaacgctctacgtgacttctaccaagtcgtctcaggctcccggcacagcgattgagctttccctgggcgccgtctctggtgccgtggctcagatttttactatcccggtggctgttattacaacccggcagcagacacagccaaagggcgataagaaggggttgatcgagacgggtcgggaggtggtcgagagcgaggacggctggaccggcctgtggcgcggcctgaaggccagcttgattctggtcgttaacccggccatcacctatggtgcataccagcgcctgaaggaggttatcttcccggggaagaacaacctcaagccctgggaggcattccgtgagtagtggcaatcaccggggtcaacaacgacttgctaattatgaaattagtgcttggtgccatgtccaaggctttggccacgatcgcaacccagcctctgatcgtcgcaaaggttggactgcagtctcgcccaccgcctagccggaatggcaagcccttcaagacctttggcgaggtcatgaagcatattgtcgataatgagggtctcttttccctcttcaagggcattggacctcagattctgaagggtcttttggtccaaggtctgctgatgatgacgaaggagaggtatgtgtttctgttcataatttcgcatttgcttgtgctaactctcgcaaaggatggagctccttttcattgtcctgttcgcctacctcaagaacatcaagaaggataaattgcgtaaggcagtggacttggcagcggaaaaggccaagactagcatgcctgctaccctaaagtaattgttttatagtcagacggtgggatttttccgaactgtgtttacctaactggcgcgttggcgtgccattggaaattttggtgggttttgaacagtctagacatttcccggcattttcttgttggaaacacttgatatgatagatacttgtgtttccagcttttcaatatcactatagatctgtacatggtcatgtcatgccttacttgcttaagctcccatgtagtacttgtttttggacgcactatttagctagttataatatccctgattacacatgtagaaaggtcctctatacgtcaatacatttcaccaccttcgtatattatacccaagtaaagtctacaacttccatgtcaatggcgagtatggtagtaatggccgctgagtacctacataagaatgaaagacatttgagaagccacgtaggcatcattttgggcatcattctacaacgatccctccaatagttagttgtagttatttcaaggtcattggttgtttactaataagaggaattggtggttgctgctttaccgcttgactgatcaacttttaccccaacaactgtcaacacccctcaccaaaccctcgttctcacaccacgtaaacttgccacttgtgtggcatgggtcgtgatgcgatggccgccatggagctccgagtcgaccaatgacgaccaaaaacaaacacccggctcctggctctcctccgcggcgaacaacccgagttccatcttcgactggacagcattcacagaagtcagaaccattgtcccaaccctcgtcctgacaagcggcattcttattgcagtgcgcttccaccgccgctacctacggcgcatccccgacgcgcccagcatctcgtcctcgtatcttcgacggcggagcatcttcggccaagtcacaagcgtcggcgatggagacaatttcaggatatttcatacaccgggaggccgcatggctggatggggctggttaccgtggaaaaaagttcccactgtgaagaaggatctgaaggataaaaccgttcgtcacccaccactcacctattcgcttgctgctcagaacaggcataactatgcctctacatatcataccacaggcccattctttatatctacaaatagcttacatattcactcaaccccagatccacatccgcctcgctggcgtcgacgccccagaactaggccacttcggccaccccgaacaacctttcgcgcgagacgcacacgcctggctaacatcctacctgtcaggccggcgagttcgtgccctcgtctaccgccaggatcaatactcgcgcgtggtagcgagtgttttcgtccggcgcgcatttgactttccgccattccgtcggcgggatgtttcttacgaaatgctgaagcgtggcttggctactgtatatgaagcgaaggttggctctgaatttggcggtgaaaagatggagaagaaatatcgcaaggccgagtggcaggctaagaagcgagccagggggctttggaaggattatggtcgtgtcgggtctgcttgggagagtccgagagagtataagaagcggattggtatggaagatcctcctccgatggagaaagggaatgggaaggggaatgggaaggggaatggcaaggggaatgggaaggggaaaaccgggcagaaatagatgaacgggtcgcggtaagctgggcttgcgattgtggctatgagcgtttatatgttgttttttatgttctggcatttgcatttgcatgtgacgagatggcacgactaccatttcactatacagcgttgtaaatgtatggatagtatgcgacaatcatgatcaaatcgcactttgaatgctgaatatgacaccaagtttcgttaatctatacatgcgcggggggttttgttccaaaccaggccccaatttctaaatggacatcaagactcgagtaatccgcctatagattaggagaatacaacgacaaaagtcagtatgcaggctattatttgctcagcagaaccgccgctcaacctcagcgaacaattttgggctaatttcgttggagctattaccctccgcatggaatagacacccttgacggtcatagtgctccaagagggatttgctcgtctcctcaaacttctgtaaacgctgcttccatgtatcgagagaatcgtcctctcgctgcgtcagcggctcgcccgtgacatcgtctctgcctggcacctttggtggatggaagtctgtattatacacgcgccctgagggctcgtggacccagcgtgatgcgatgcgggcgagaatcactgatggaggggtgattatgtgcacgacaaagttgaccgatactaggctgtccaaggctattgcctgagttgcggtacggggaaacccgtcgagaataaatgaggcagagggatcgattgtgtgggctgatgaggaagtatcggctgaagaagatgacgaggatgttgcggatggtgaggatgggagtggtgggaggagccagcccttagatttcatatcatcggagatcaatttcaggatcattgagtcgggaacaaggttgccggactgcattgtggcctcggcttccaggcctattactatgttagagatctctgctctgtacgaaactgcgccgttgctcattctacttaccgaggggtgtgcgtaggcgcacattttctctcaacagatcacctgagctgatggaagccagctgtggaaatcgggatagcagtcgctcagactgtgtcccctttcctactccaggcgcgccaatcaagatgatccgcgcggccttacggagctgctttgtcacatgcgacataatatgggattgctgatgctgatgctgagggctgaggttcaaggttgctggaacggagaattcgacggtttcaaatgctggggatgcgggaggaacgacggggagaaaatatgcacaatatcaggacagcataatggattgaagggaagagtgaaggcctgggattagaaaacaaccggtcgcatatctccaaggctaactcttttgagaatgttgcttctgcggggacgcccggggaggttgatcttttcggctatcggtgaagactccgaggtaagctgtatggcagcactcaagtctatgtaggtaattatgaaaatattatacgagaacataacataactaccccgagcgaagatcaaagacttatatatctacttacaggactcggtatcaatgctcatgtcacatgtcgtgccacatggtcgtagaaaacgctctgatcggggaaagccaccacccgtgctcaggccaagcaccccagggagccccagggagcccccggggccccagggctggggtacagtattacgtaatatgcgccaaccgatttctttcacgtgattctacgcgtgggacgcgttcgcgttgaccaatttagtgcggagatctcatacattcgtttctcgacaacacaatacctacaccatgattcgacaagacgcccatcgcattgatcccaaacgacgggctgttattgaccctaaaaaaagacaatttgctaccccagcgtacaagcagcaggactatgctcaccgtctgaacatttatgaaatacctcctaccgcggagatcaccctcgaacaattcgagcaatgggccattgacagactgaaaagtatgcaaatttacaccttcctgttgtatttctacccactaataccaaacagtcttggccgaaatcgaagcatgctcttatagaaacaaatcccccgccgagacagcgacctacattacacccctgctacagaaattcctccctctctcctccaatacatcctctccctctggcgctgcagacccccgcttgaaaaatgagcgccaaaaggaccattactcccatttcatcctccggttggcgttctcggccacagaggacctccgtcggcgtttcgcccgcgccgagaccatgctgtttagatttcgtttccagcaggacgactcgagggagaagcgcgcattcatcgatagcttgaatctcgattgggaacctgtgggtgactttgaaaagacggagattgcggaaagtctcctcagctccacgcccgggctgcgtcggcttgatgatgagacctggtataaagtcgattgggagaaggttcccgaactggtcgaacggcgcgcggttttcctgaaaaaaggcaaagcttatgttcctggtcgagagcagctgagcatgatcatggctgagtttaccgctcgcttggagcgcgcactcgaggtatgtctgcagtggtgacgcttaatacatgaaatctcgtggctgattaattctagctcacgagtcgtgccctccctcgtttggacgaggatgatcgtctaacgcctattctcaatcatctttcaaagaacttcggcagcgccgagtcggtatactcggaaggcgaagggtatgtggacggatctccgatcacggccagctccatcgaccaactggcccaacagcatttcccgttgtgtatgaagagcttgcacgtgaacttgcgcaagaacaaccacctgaagcacttcggtcgactacagtatacgctcttcctgaagggtattggcttgtccttggaggagtgtattttgttctggcgtcagtcgttcaagggcaagaccgatgacgagttcaactcccaatacaagtacaatatccgtcacgcctatggcgaggtcggtggggatgtgaatcgtcgcggaaagggctatactccctactcgtgccagaagatcctcggcgattcgaatcccggcattggccagactcacggctgtccctatcgccattactcggttgataacttggtgggcttcctccaggccactggcgtcaatgacaaggaagtcctgcggggtgtgcgtgaggacgttggtaagatgcggtatcacattgcttgcaacagagtgttcgaggcgacacacaagaatgagatcaagaaagtcaaggaggatggctcgtggagtcagactgaccttgacacaattgttcatcctaacacctacttcaagcgcagcttcctgttgaagcagatgaccaaggccccgaaggatgcttagggcgtcttttcacatgtcaaattttcatgatataatgtcgggcagtttcccagttttctgttttatagtcggcgtttagagggagcataagcttgtacgagcacatttgaagcaggtggaattgaagcaagataatatatattctaaccattatggtatacaaaatgggagtgtgaccacagctgattcccagagaatcggaaaggatcagaatgacctctcaaatccaggtgcccagcaacgggtcaagtcgttctccgctcaacgagtggacaactttgccatggaatgacggaagttgtcgatattaacatgtttacacacattgtaggctggcgtgaatttgaagaagaaaaagaaaagagcagcagaaactgcgcacgagccgagttttaaggatgttttgatccgggaggcggcagagaccaactgtgctgcaacctggccttactcacggattggacctccacacaacatactcctccatctcgttcattcaatccctaggtattaaacgggactctgatttcttttgggactggattatgctccgggtggctcacttgctttaatttcttggagtagaccctaaatttcaaggttccctctcctcgcgacttctcggtatccgcatataccccctccctttgtcaacacaggaccgagtcccggaacatctacctacaagatggattacgaagcgctcaaggatcaatggagcgatgtggaggaccgcgatggcctcaggctcagttggaacactttcccgagcactcgtatggttcgtgatagtggccctctctgaccttcaccgcatcatccgctgatgcttgatataggaagcgtcccgcttggtcgttcccatcgccgccgtgtacacaccgttgaaggaaaagcccgacgctcccttgctacaatatgagcccgttacttgcaagcagccctgccgagctgtgctcaacccatatgcgtacgtgacatgtcgatctgatatacctcaatgagtagatggactgacgcttggacagcactgtcgatgtccgcgcacgagtctggatctgccccttctgtctctcgcgcaaccctctccctccgcattacaaggatattacagagaacacgatacccccagagctccacccccagagcacgacaatcgagtaccaattggcacggccagcccccgctccccccattttcgtctttgtcgtcgatacctgccaggaggatgatagtctgcaggctgtgaaggattccctcatcatgagcttgtctcttctgccgcccaatgcgctggttggtctgattacgttcggtacaatggtaggcaatgatgatcttcgcaacgcaggtgacatgttgttgaccttgatatataggcccaagttcacgagctcggctacatcgaatgcgccaagtcatacgtgttcagaggcaacaaggaatacaacgccaagcaggttcaggagatgctgggcctatccggtggcgtgcgccccggtgttccccaacaacagccagctcgtcctcctcttggcccggctgcgcgcttcctcatgcccgttcaacaggctgagttccagatcaccaatgtcctcgaacaattgcagcgcgatccctggccagtggccaatgacaagcgtcccctgcgctgcaccggtgttgccctgagcgttgccgtcggtctgcttgagagttccttccagaacgccggaggccgcatcatgacctttaccagtggtgcagcaactgagggccctggccacgttgtttcgcctgaactgaaggagcctattcgttcgcaccacgatattgaacgggacaatatcaaatactacaagaaggctgttaaggtcggttctcaacgcgtgagtgtattggattttgctaatttgctcctagttctatgatgccctcgctaagcgcgctgccaacaatggccatattgtcgatattttcgccggctgtcttgatcaagtcggtttgctggaaatgaagaacctctccaactttactggcggttacatgcttctcaccgatagcttcacatcctcacagttcaagcaatcgttcgtgcgcgtgttcgacaaggacgccgccgataacctcttgatgggcttcaatgcatccctcgaggtgctcacgaccaaggaacttaaggttactggtctgattgggcatgccatctcgctgaacaagaagtcaagctctgttggcgagacagaatgcggtatcggtaacacctgtgcatggaagatgtgtggaatggacccatcctctagctacggtatttactttgagattgccaaccagggcggcccagctgctgttcagcctggtcctcaacggggtatgattcagtttttgacatactaccagcattcctctgggcattatcacctgcgagtgaccaccactgcccgccccttgagcggacctgcaggtgacccaaccctggcacaatccttcgaccaagaggctgccgctgtcctcatggcccgtattgcagtgttcaaggcggaggttgatgacggtccagacgtcctgcgctgggttgatcgtatgctgatcagactctgctcccgattcgctgactaccggaaagatgacccgacatcattccgattggaaaagaacttcaccttgtaccctcagttcatgttccatctccgccgaagtcagttcttgcaggttttcaacaactcgcccgatgagactgctttctaccgccacgttttgaaccacgaggatactggtgactctcttgtcatgatccagcccactcttgattcgtactctctggagcaagagggtgctcagccagtgctgctggactccgcttctatccagcccgcccacattctcctccttgataccttcttccacatcctgatcttcaacggcgagacgattgccgaatggaggaaagccggataccatgaacaagagggatacgagaatctcaagttgcttcttgagcagcctaaagaggatgctagggttcgttcccacctttcttgttgatctttaacctatttactgactgtgtattataggatcttatttccgaccgtttccccctgccgcgtttcatcgtctgcgatgccggtggttcccaggcgcgtttcttgctgtccaagttgaacccgtcgaccacccataccacaggtggctacggtggcggtgtctcatcgcagaccatcttcactgatgacgtatcgctccagacattcatggaccacctgatgaagtgagttttcctgcaattctgatggatccttccatgctaattttattctagacttgctgtatctggaaccagctaggtgttatgagacatggccatgagagcaagggcggtctgtcatcgaccctcgggtcttgtgtatctttagcggtgatttaaatcttttgacgcgatatagtagaagattgaatggactataccattacaggaggatttcttctaatttcctgcaatatttatagctaaaagccctgaaccgccgagaataaaataaatagccgtcttaccatcccaccctgagttagggtgggtctgtcccacataacgagagattctcacaaaacgagagatctctcttttaggtatcttttatatggtatacccgtacaaaaggtacatatatcccatattatgttcttaagcctttggagttaaaggggaaataagagtataaatcaataaaaattttatagttgaattaattggctgataaaagaaatttcagatatcttatatagagaagtaaagaccatatttatgaaagagatatatgtaaaaacatcaacgttctaccgcttagagaatactcaatatttcttcctaatatgttaatagtaaataaaatagacctcctttagactatatatctatcccctactatatctttttgtaagtattcccagaagtgacaaaatctctactatatatatttgtaccttttgtatgggtataccatataaaagatacctaaaaagagaaatatctcgttatgtgggacagacaggtatggggcggtaagatggctacatacccaaagaggcaagaagcttgataagggttttattgtgtcacgtgcttaagcttgcgtgccctaactccaaatttgaatattcgcttagatgagcaagtgtgggccgcgctagcaacgagtctccttcaagtttgatttttttgctccttttcttcctctcctctgtaaccaccctcttcgacaaccaaggaagatcgactacctttcgcactcgccatgcgtaagtatcatctacttggcctattgcaagatggcgactaacattccctcgtgatcagctcccaagttcgatcccaatgaggtgaagatcatgtaagtgaatttttccccacaggtcctctggctgtattcagccaacaggaaactaatcattcttttgtctttagccacctgcgtgtgactggtggtgaggtcggtgcccagtccgctctggcccccaagatcggtcccctcggtctgtctcccaagaagattggtgaagacatcgccaagaacactggcgactggaagggtctccgtgtcaccgtccgcttgaccatccagaaccgtcaggccgccgtctcggttgttccctccgcttcttccctcgtcatcaaggccctcaaggagcctccccgtgaccgcaagaaggagaagaacatcaagcactccaagtccatccccatggatgagatcatcgagattgcccgcatcatgcgcactcgctcgatggccaaggagctccgcggtggtgtccttgagatcctcggtactgctttctccgtcggctgccaggtcgatggccgcagccccaaggatgtctccgacgacgtcaagtccggcgagattgacagtgagttttgcccatttatgagcggttcgatcagctactaacagtctaattagttcccgaggaataaattattctctcttgaatgctcaaaaaagaggaggcctatctgatttctatggcgtgcttctcttaatgatgagatggctagttgcagaatacgaatggttactcaaaaccaacaaaatattcatgagtcatgacctatgataccttttcctaattcgcgagtgcccaattggaacaaattgaccagctcgctgctcgttctttttcctcgttcctttccggttgtattatcctcctttctcccaatccctctcgtgatcctcccgccttctcctatggcgatgagaataatggaaggctatgcccggcgcagccgacagtccatcctttggatggaacccccacaacactctggcccttactgttctttccctacggggattgatcatatcaaaacgtggtataggcttattttaagtggggaagagaaaaccagtcccattactcatcgcggtatccttggagcttgtcttcgtgggtacagtggtccatatttcgggtctacatctcttgcagatgattatccttatttctcgtaggccgtagtctcgctagctccaatgaacgtttctgattatcattttattttgcatctcgtatcaattatttattctgcgcaaggatccgtggggtcggaccaaagtacggagtactttaccatatctaacacagaacctgcaggctgtcagcatgcgtacatatgcaacgtgatgttattgacagttgggcgtaattctaatattgatatgatatggctacttggctgcttacaacataggctgtacggaatgctaggttagaaccctagtatttatttccattgctcctgaccgatatatatattccgaatgaaacgagccccacgcgacaagggcgatgtctgtgctgcaccacgaatttacaattgacatacctagctactccgtacatggtacagaagtagacgtcacaccaaggctgcaaatagccctgcctgcagtctggaacatccaacggccgctacaccacgcagagctcgagccaacaagtatccgagcgtgacgcaccaatggaaattcacatcagaacttagtacggagttctccgtgcagcgattttgttgcccggcatacgtggacaagaacagttgtcctaaattctcctccgtagtggataaatagaaaaagagaatattgtcaataattgctcacgaatggctgtgagattggtcaatataataaaatgaggaatgtcaccgaattaatgtctaacaatccacccataacctcagccctgataaggcgaggtgcatgctcatccacaacgggggctgatccattttgatgtgcgagttgtgtttcgtttattcgcgggatatatttgggtcgaatggagtcggaatatcaagtagaatatcaagtggatattgagattctttcttttattttatttttctctattgacatactgaaagattgagccagtcaacagtgtctgtatcacccgacccgcatgccgctgtacaggaacgttgtgcaggccaaggaaggatgcgacacacggtgggggcagtttgccgatctctgcctatgacacgttaactttatgggaaacggatgaagggttgggatattttctatatctttttttataggtatgtaggtataggagagaaaggtatattatgtgatatacaaaaaacatatgatttaattgcttcgcttcgctccgcaattaaaacaggaggctaagaaatgacggcagggatcgaggtggaaatgcttgcaagttggaaccccagaataataccggataggcaaggatcggaggagccaacaaacggggcctgtcagaagaggatgggaaaaaagggaagaattagggaaaaattagggcaaaagagagaagaagaaagaaaaagaaaaggatgtcaacaaatacggcatactcagtccagtccgagaaggagaacgagagacagtttggattcaatttccttaggttcagctaaagtcccagagcccacagaaaccgagaacgggctcgactcgatcaccggcgggggcgtcaccgatccatcactagtcgccgtgatggaaccaaatgatccacaaggattggatttatggagagccgttggatcaagtggatatttgacatttgatatttggatttgtatgttttggagggattgaagggagggagatggggtatattgtatagcagaggggatatatccagagatagaagagatagaagagatataagagcagcatagagcaatatcagacatagaacataccccattcaacatcctacacattgtgtttctttattttatataaaatttatcttccccccacccgaatccaccgtgtccactcccctcgctctcaccttcaaccttgttctttctgactttgcttgactttcttgatcttctcgttacttttctcctcttcttctcttctctctctcccttccctgcacagagtactccatatcctcttccttcctgctatccccactgattctcttggtctccattattgatctacccctcgcacttgccaagatctcctcttattggctgtatcggacaccagcatcgtgagctggacattctgtctcccttgcatctctgatctcctcttggattttggatttctgatttttttttctgctccctcttatcatacatacttccccatccacacttttcagtcgatgacgataccctgaatccttggtttgcgcaaactgaaaagccgcaaccggctgaattgcttagaactggcttgactggcttcacagaatggggtgtcggaaacgttacaaggatgattgttgaatgttgactccattgacgtgttgagtctttggtatccttgtcgctggtcggccaggtattctgatcccagtggatcgaggagagagcaaagatgtatccgaccgtcgcaccgtttcccccggttcaaccgcaccaccgattacattatcatacaagcaccctcaaccaccacatgtacgatgcgaacgactcccaactccccgtacgcaatgacttctccaaacctctcttcaacacaatgccacgatcgcgcatacaactacctcatccagttcaacgcgtggattcccgcgatggctccggctatagctccagcaccaacgtggccgaacataccctgaggagaaaaacccccaacggaactctggctgtgggatatgatgggacccctaacgataccattcagccaccagcatgcaagcatatcttggtttcgccgatggagcagagccagttcattccgcctcaacaagggatgcagtccgaaaattggcagctcatgctggaccagtcagccaccaagcaaatgaatttccccccggtcttcaaaaatgactccgcaggtaatacaatccaaggagaagtcgttcaagatgtgcatgggacgagctgggttcgtcctgtccattatcctccgggcgttgactccatgttgaaccagactttgcctctgcagccatctcagcgatacctcttgcagaatgggcaatatgtgcccaccgttctcccagcaaccctgcaatcgtgcctaggaccaactgcttcggcaggtactggaccattcggtccgtattggcctgatggagtatacatcccatatcgcccggcagcttttcgtgatgcgcgttttgaatccccgacgccctttacaaagcagatgagccagtctttttacgagctcaaccagccagccttcaaccaagctcaagctccgctgggcagccacacggattcggggcttgcatggggacattctgtgtctgatttgcctacgcaggactctttaatgaaacctctttttccaccacgtcactctgaccaattacctttccatgcccgagccaaccgtcccctatcgggcctttcgcagccactgaacaatgagcccacaaattggtcaagtcgcccactacatggattccaacccccagtccctgccgtagtagcgaacgcggatttcaaggagaaagtcctatcggaggctcacggtgtctatgttgacctcctcgcaaccatccaccacgcccgccgcaacagcaatagtaaggctgccgtggacggttacccccgattcttgaagccgagcatctaccctaaacccccacgacaaccaggtctcgacttttcacaagcccctccgcccgacctcacacgtcataacagttacccagctagtcaatatgacttgcaacgccagaaatttaatgtcgcaggcagccataggtcgaacgatcctacatctacttctcgcgtccagactcgccgcccatccttgaataatttcgctcacagcagagggtcggatacccatatgctcggattgcgtgacacgggctgtccttcaggagtgccgactttcaccaggactcgtggctctctttttaatgagggctcgcctatgtccaatgctgcatctgcattgtcaatgctgtctgacttgtgtgcggaaagtcgttgggaatggatcgacggaatgcttctcgggggttgtttagcctatggcttgggtgattatcacaaagccgtgcggtggtattccaggatcatcgctcgtgactcgacacacgtggaagccatctccaaccttgctgccaccatgttggcactcgatcgccgagaggaggcttcgcaacattggttgcgcgccgtgcaactacggccgagcttctttgaagccgttgaacatctgataggtctactctgtaatagccacagaggcagagaagctgtcaacatcattgattttgtgcagacttcccttcgtcatcccaaagacggcgattgcttcaagacagatgaacatgctagcgaacccgagagtgacgctgagagcaacgtgtctgatgtgtgcatgtatgacaaagcatctttcgagtatgatgatgagatgggacgaatgcagggaatggaacctggctcaccggatgctaaaccccttggttttgcgagcagtggttatgcaatctcaggtgcggagaacgggcgaatgctagctttggtccatgccaaaggtaatatgctttatgctcttggtgataacgcgggagctgcagctgcatttgaggatgccgttctcatcgccgctggccgaagacgacatggtatccaaagcatcattaaacaaatttttgccgccttttctagccctccgagtaatgggtattctcaatccgagaaggagtcccaggagagcattctgctctatcctgatacagcattgaaaacagccaaacttgttttcccagcaggcggcatgccgccggggctccaataccgnnnnnnnnnnnnnnnnnnnnnnnnnnnnnnnnnnnnnnnnnnnnnnnnnnnnnnnnnnnnnnnnnnnnnnnnnnnnnnnnnnnnnnnnnnnnnnnnnnnnnnnnnnnnnnnnnnnnnnnnnnnnnnnnnnnnnnnnnnnnnnnnnnnnnnnnnnnnnnnnnnnnnnnnnnnnnnnnnnnnnnnnnnnnnnnnnnnnnnnnnnnnnnnnnnnnnnnnnnnnnnnnnnnnnnnncccccggggggcgcccccccgccggggctccaatacgtcgccgaaggtattgctcgcaatgcagcaacttccaccacgagcaattctctcctttcattggcgaaaatttaccaggatggcatgtccaacgttggatcctcaggacgaaccaggtcttcccctggtgtccgggatattttggccctctattatctttccctctccctacaacctagcccgtccactgcaaataatgttggaattttgctggcgggcattcaaaataacccaccggcgagaggtttggtgcgttcgaaaggtgagactcagcatcacctcgagatccctggagtcatccctgggagtggaatatccctagccttggcatactacaactatggcttgcatcttgactcgcgacatgcccatttgtataccaacctcggcagcctactcaaagacatcgggcagcttcacgccgccatcaagatgtacgagcaagcggttcagtgcgatggcaacttcgatatcgccttggctaaccttgccaatgctgtcaaggatagcggtaaagttaacgacgccattgtatactacaagcgagctgtcaaggtcaaccccgagtttgccgaggcggtgtgcggattagcaaatgccttgaactctgtctgtaattgggtaggccgtgggggcatcgtcaacgctcgtggcttccgagatcgatggcatgttgatgacaaaggaatgcttcgggattcgctcaacatcgatacgggctctggatggatcaagcgggtagtggatattgtcgaccgacagctcaaggaaggcgaatattggggccgtggcatgttgactgcgagtacggcagagcaattgtgcctgcaactggctcccgctttggaatctactcgctttgcttccagccatcgtatctctctggtaaagcttttccagtcctgggccggacagaaatgggagggatctcgactcgtacgactcgtcgagcgagctatccggtctctcacttggcagtggtatcaggatcgctatgttttcggcaaagattacccgctttccaagtatcgtcgacctcaactcccaggaggtctttctgccccgaatgcacctaccgttctgcctttccataccttcacttgtcccctctcggcgaagcaaatccgtcagatctcccagcgcaatggactgcggatttcaacatcgactcttagactcccctggctgccatccaccgtcttccctccaccgtctccgcctagtccgtaccttcgagttggttatgtgtcatccgacttcaacaaccatcctctcgcacatctgatgcagtctgtgtttgggctgcatgattcctcccgtgtcaaggcgtactgttacgccacgacccccagtgacaaatcggtacatcgccagcagattgagaaagaggcccccgttttttacgacgcgagtggatggccagtcgatcgactagtccagcagattgttgcggatggaattcacatcttggttaacctgaacggctacacgcgaggagctcgcaatgaggtctttgctgcacgcccggcgcctattcacatgtcattcatgggcttcgcaggcaccctcggtgctgagtggtgcgactacatccttgcggatcagctttctattccgccagagacattgagccccggacggcgcaccacacggatcgaggatcgtctcctggaagaagacaatggcgaggaacttgaagactgggtttacggcgagaagattgtttatacccgtgatacctttttctgctgtgatcaccgacagagtgccccagatgctggcgaaaagcacgtatcctgggaagaagaacaagcccggcgttggagaatgcgcaaagaattattccccaagttgagtgatgacactatcatcttgggtaatttcaaccagttgtacaaggtcagtctatttgcgaggctcatcccaaaccacataactaacccccttgcaggttgaacccacgacgttccgaacatggctgcgcatattagcgcgaatccccaacgctgttctctggctcctccgcttcccagacacgggcgaacaaaacctgcgagacatcgctaaagcctgggccggcgaagagacggcatcgcggatcatcttcacggacgtagcgccaaagaacacacatatcgcgcgagcgaaaatcttagacttgtttctcgacacgccggaatgcaacgcccacaccaccgctaccgacgttctctggagcggcaccccgctacttactctcccgcgctacaagtacaaaatgtgctcccgcatggcgagcagtattctcagtagcgcgctccccaactctgaggctggtcagcgcgcccgtgaagatctcatcgcctcgtcggatgaagattacgaaaataaggccatccgcctatgtctggatctgcagtactctggtcatgagggctatgcccgcggccggctggcagatatacgacagatactgttccgggaccgctacaagaataagctcttcgatacggcgcgctgggtacgcgatctggagaatgcttatgaggccgtctgggcgcagtgggtgaacggtgaagaaggtgatgtctggttatgatgtgcactgcgaatataccccttgagcgatttttcctttttccttttcttctgttcattcgcattctattttgcatctacctcgctcctaccttccgccctgggtttgagctggatcatttatgtaatgaatttactttttgcatgtggctttttatgatgtatacgtacattgggaacatttacgaaagagggtctgtcggatggtttcttgggcaggcgtttatgccattgatatttattctctgggttcctggttatgacgacctgtagtctttgtgatttcggtcttttggataaactgaacagcataataggtctaccacaaccttgatccagtgcaatcggcctaccatttcctctgttaatgatttacaaacgcatctcagcaacgaatcacattgtacgggcacattatatggtaagctcgacccctatacttagcagcataatcacatcatatccactcatctaggaataagctgatacccgctgtctccctattgcggtatgcaggatcaagccacgaagccttcagccctgaaaatccctgtttacgattggtacgtcgcccccggcgaccaatagagtcgacgcccgttccagccctgagtcacaatccaagacattcattcatgcgccgagacagcaggccaatcaataccttgatgttggcattggctttggacggagcacaacaaatgttctccccgcatgagcctatcacagcatcacacctccctatctcgtctctctacgatccaagctccatgtcttgagaacgccctccctcccgtctcgcgaggggatggcgtaccaattcggatatcagcatcctatttaacccacgcccagtccaggtctgggtccagatcgacgcccatcagccccaaaccaaaaaccagaactcaaaagccaatctactagcgtgacggaggctgaatcaggacatccgcatttgcatacaggcaaaaacacgccacgtcttcggctctgttgcacattacgcattgcacagtacatacacccctgaaactagtggagtaagtagaaagggcgttaagccatggtctatatcgacatctatctattcctacagagtacacatcatgcacataccccggtcgacgcggcatggcattctggcattatattacatgtccacgccctcggactagggagtaaagtaagacatgcgcttatccgtcttttgtctgcaggttgccaggttgattcccacatggcggtgtccacgcgcgtcgaggattttgagattgaccggtagggattttggtgtgtatatatatagagtgagtgagtgggtttggtttgtatatacaacatacaggtacaggttgtcagagatagaggaatgacacaccgacaagtacttagaatagacaaaatggatacgatgtatatgacaggaagatcaacgacgaacctaaatccgcccgtttgaataaagaaatgccacgttgaaattttaataaaacaatcggcagatatcctaccactactccgtacccacccaggatccccctcgccctcatatccctacatcaaaatacaaacaataaccccctacccttcccatatcccttatcccttacatcacatcgccctctcgttgtcgattcccgtcccagccaagtaagcccgttcgcttcacaacgcccacgagagagacaaaaccatgcaaaccgggaactcacctgtcccatgtgccgtgtcatatctaccagccctagcaggatcacccggttgtccgtaattgtcggctatggagcgttgtgagtggcgtggcgcgggtggggaacaagccacacagatttgtggcgttggatcggtcgattagccgcacagaatcggcacctggagccgaagaaggtggcttgttttgtttttgggcttgtttggatataagatgttattgtcaagatgttattttgtatgcggtacgggagttcaaacaaatggcggagttagaagtatggattctagaactttgacggaggaggaatgatgtgttttaaggcctagagggtccataagtagtccgacgggcctaattgggaatgtgtttcgcaagcaggtgttacttgaattagattagaacaaatgctatactcgaatgtcgcgtagttgctgctcctatacataaccctattaagccgatcacatgtctaagcaatgctagttaactaactagttactctgacaagattgcatcattagcaatgacgatcagcgagagcgagaccgagacccagacccagacccaattccaagatctcttaatcccgagactaacgataaatctggaagccaaggtcaagccccccaacaacggggtggccgttgcgtcacgcgccctccaccatccctgcaagcccgtctcaccattcccctgaaacgaggctcaaagaagaaaaaggggtcgccaggatcattggctcaggattctgtatagattgcgcttcatttcgcttgttgcaacacgcccccccggaaaatgttcgggctgcggagggtccggtggggagacgggaatttctgctatggcatttgccgtgggccgtgggcttccgggcttattggaaaactgctaccacgatgacaatttggcccccaggtctaaaccgcaggatttgaaaggtttcttggggctttgatcgtctaagggtaacaatgaaatagaattccgaatgactgggttctttgtctttggaccttagctttgcgggaacgattgagtttggcccggatagatagggttggtgtttacagtcggactttgtatacggagaagtactggttttctaggttgtaggttgtccatgttgtcaatacatatttgcacatgttaatctaatttcacaaatagatcttctcaaatggttcgcggatctcgacacttcaagcggggcgcatccgacgtaaccacaagcttttccaaggttgtcaacttcagacttgcggtttgtgatatctccatgtagtacctgtttcgtagatcgtttgacaacgtacggagtacatcggttcgttcagcggtggatctatacagacaactatatgttgtacaacatctgtgttactacagcagtataccagaggtagtcgctctgcgattttcgaaatctgctaagcaaaagattgtacagagtacagagtaagagtaagagtgtgacagcgtaggcccaaacggtttcccacagatcgggcaccatgcgagtggtccccgatatctaaagcccgagaagatggcccaccaatcaccgtctaagctgccggtgtgtcatggccgagcaaattcaaattcgagggattccaactcagactcagatttaacttcaatctcctcgatcgatttcctgtagcccatgcaagttgcgtcacttggactgtcacggagatcacgggttggttccttacgcctccatcttagactgtgtctgtactctgatgatccacctcgtgttgtatcaatgaacatatcacaaaagttacatcccattacccaaaagggaatggaaaggacgagggtggcgatcggtgaacactggctatagctagagaatgtagaatgatccatgatgtactcggcaccccacacggagtactccgtactccgtcagctttgcacgatgattttctctatagacttgcacgtcagcgtaagcgaggcgatcgttttaataacatccgaatcggggacaatatattgtccccacgtgacccaaacggcgaaaaagggggccacaggaacgccgtgcttggacccctgcaaagccatgcggaaggcccgacagtcaggaaacagctgcgagaccgttcgctccacatttagacttcttagtgacgggtactccgttgagcttggatagatgggttccgggtgtttcctgggagtgttggtgttctagttgtgctcatgctcgatcaagtatctagttacttactctctcttcgtctactgacacactcctccaatccccgtactcaaacagccgatctaagctcgagtgcacggggcgacgtgatcagcgatgatccctgcaggccgacagggatttatctcaaatacttgccgtgtctctgattggcgaagcgacagggggggggaacaatagtctatcttgagtaaactaagtcgggaaaacaacaaatcaaaattaattaaaattcaaaatctgacaggtccaatctcgggtacaccctagtcgatgttgcattccaggacgacgggttcatcctttcagaaacggcttttcccaggagtacggaaatccgatctggccgtccacacgaggaattgtccacatggctacacaagaactttccctttttgtatttttgacttctctacaaccgtgttccatggaatatacagggatacaaccttggaagcccaggggaaaccaattaatatcttttctccacactctcagttttgaatctatagatagtcccgttcagaggttccaatcattaattaatggttaatctagacaggtggaatagatgaagtgatcgaatagattaaagatttgaggaggcgtctatcggttaccaaataggaagtcccacactcaccatgacaaatacctgggggaccaatcaacttcccagttcttccatatggatctatgcaggtaaggtatgcccctggaggatggaaattacaatatatacgcattcggtacgtattgctgtatttttaccctcccacagtggctgtgctcacccaagggttcagagccataccgtctggtgacaaaaaagcaaaaaaaaaaggtgtggcttgcctttcaacggtttccaccggtggagatctcctctgctgcgacatgcctaacggggcagtctggaaacttcgcactcgtcgatcctctctttcgatccgatctggcgttctgatgcatccatccattgtttttttcttggtacaccagtgtttggactagaaatagtcggtgggctgaaggggacgggaaaaatagattgacctatacttgcgccgttacggtctgggaacaattcaagatatccacatgcgcagattagaatggataacgtcacgtcccgtgtctttgcagctgtctgaataaaaacgacatcggctttaattcagtttccgcccccctccaggcgtcatggagggatccacggtcaactgtcagtgacaggtggcaggtggcccatgcttttcgtttaatttagtgttcttttcttggaaatggattttgataatataaaaagatccaggattaagcgagcctcgaccgggatatagaacagaaaagcaaaaccgtcacgtttgtgatggggtccaagccgtatggaagacagcctgcaaggcatatcacaatgtgccatggaatccgtagatattgtacaagctgatcgacgtcttcacgaatacctcatacctcggggttgttcgggctagagcttttatcacacggaggccccgatttccccatactattgaatccaaaaaagggataaaaggataaaacaataaaacaataaaagaattcctttagaaatttgtcaaactcggtccaccggtccactgctccaccgtggatcatcgcgaggtcgagaaggaaccctggtcgagccaatgagatctcggccttgaccgatggaacatggatcggatatgaatcgaggaagtgttgtgcatggctggctgagtggaatctgggacgtctaaccgcttgtcactcggaagctagatctgcccctggctgtttttggcgtggtatgccccctttctgctttattgttttattgttttagttatattattttatgttagatctataattaattcgtaggatattgtcttagttgtccaattgtcaaacgactatgttgtataccagaatcgaaggctgcttctataacttgcaaatccaaggagctagaaaatcaaaacagttagcgccttgatgatttggaattccagcaacggggctcagggtcgatcactccgatctttttctgctttacgcgtctttcctcagcccgaattcccgggtggtactgaagatcctaacggagtatttttccactccccacgatctatagattacaatagtgtggtatttatttgattttattttctacatgttttaccttgcctgtattattccgaactgtcagctccgagatcttggatcgtgatcttccatagcgggacctgtatttttttcttttggacccgtccccctggtacttaagacttgactactataataacctcttcgtctacttatacttcaactctctttcttctatcatcatatcatcaccatcaccaactaccaccatctaccatcatctaccaccaccattacatctaccaccctactactctcataatgcctgcttcacaccgtcgtggtccttgggtcccagaggaagaccaactcctcacccaactagtctgcgaacaaggccccaacaactgggttcgcatctctcaacacatgcactaccgttcgcccaagcaatgtcgcgaacgttttcaccaaaatctcaagccctcgctaaacagagaccccatctcccccgacgagggcctgatgatcgagcgcatggtcaatgaaatgggaaagcgctgggctgagatagcccgccgcctcggcaatcgcagcgacaacgcagtcaagaactggtggaatggcagcatgaaccgcaagaagcgcggcctgtccactcccaccacttcccgcacttattcaggccgcatcgaggcaccctacacccgcgcctcggcgatgagcccatcgcgctctcgcttctcttcttcctctcgcccctcgtggacagagtccatcgaatccgctatctctgaacaatactcccactcgcgccgagaatccatggcttcttccacccgccatctctcccccatctacacactcccctccatcaaccgaccaatcgagactcccctcacctcgcctgctttctcagaggcttcacactccacctcttgcgagccgccttctatggtctcagaccacaattccgtctgttcttcttcgccccgcactttcccctctccgcaactcctgcccttgcccgtcgacctgcgctcgcagtacgagatgcggaggcccagtgtccacgttgtcgaggactcgcccagttacccggctcgctcgctcgagtctctgtcagagatcgcctccacgcagcgctggattggccaccagcccaccctagcctcatggcaccagcctatagacttgcccaagtcttggatctccaggtctgagcctactcgtgacactcgaatggggttggacaatttgctcaattgaaatatacctcacatcatgattgttacgagtctcatttctcaactctgttttccctcgctctatactcctgattccccttggcgctcgggtccatcgatggaacccttcctgtacatttgccgaaagctcctccattttctttgtgtctatgctctcttatagggaggtattatgattttcttttgtatatcttaatgtgtattaccatgtcattttcaaagtctgttcttttgggccttcgtgctcggttctacgttgaatgattattttgcctattttgctgtttgattaggcacgcagtctgggctctctatttctgcatttgggatcgcataataccctgtttatagtaaggatctaattgaataactaataataataatatctaagcatttcactccctacccaaatctgcattccgaccctcctatacacagaccaccgcaagtcgcacatatacgaatgcctctgtactcccacacctccccggttccagccagcctctcgtctaatattgcagattgcaggcatcagggaatgcagtcatgcagcctccaaccgtttcgctctcccctttgcacgggtccccatgaggaatgcgccaccgggcacacgctgtgctcacgaggacggacgcaagggatgtgagagcatgaggcggccctggttctggttagggcctacgcacggaagtaaggacccacccgtctgtctgacaaggcaaggtttgggatacagagatggaacgtgggagattgtagattggaacttgtatagtgtctatgtattgttgcagatgacgtgatgattgatgtttatgcacatgtatactagattccagctagggatggccatttcgttttgggaaataggaaataggataatacctaatgctgatgctgatgctgatgctggctcatgtatggcctgcatccagaccatcacgtaatgcatacatgtacataatgcataacccatgaataccctgcacagtggcaggcaagaatcagacccggacatgacacacacctccaggaaacaaaagaagtctattcgagaggttcgtccgcgcctgcaggagaaaatggaaaatcaaacggtctggcaccgtctcgatctagagtaagattgacattgacggatccactagaggaatggaggatatgtggggctgcctaagctgcctaatacaacgcattaacctaaaacgcagagcgagagagagagagagacagaaagagaaagagagagacaaagagagaaggatgagcggggaaagaactatattcagtatgtacatattccgtataggaactaggatcaacgccacccaaccaggccagggtacggaatagagaccttgattatcccgcctatccgccccatttctctgtgaatgaaaccgatgcgctacggtggtgtttcgctcggatcgcccaggacgggatgagcgttgggacgagagccaatcagcggaggggtcgtgatgcattaggacggatttgtcaccttctgacgggatgaacggcggggctcttggtgttgcatggatcgtggagatgttcatgcaagccctctgttttgttttgttttgttttttttttttctttctctcttttgtcgggtctcactttccgcttcccccgtgaggctgtttggtgcaggttgggctttggccgttgagatttggtttttgatttaatttggtggttgggttggggtatggtaaccatgtttatgccgtttcatcgtggtatttgggtctgtttcatttgatctgtttcgagtccactataggattatcatcgtctattctatcaaatcatcagctccacattaggatggcgagatgatggcagctatcgcttccacacaccatctcgaaaataattgatcggatattatctaccattcgtcgaatcagatcgagtagattgacttccgatgtgataggacacagtagctcggtaaatcataagctaattaggaattctatcttatacagtaccttgtatttcaacattggcattgtgaagatctgcaggctcccagtatgtattgtgcatcttttggcttgcataccgtccatactgtttgtttacttaccttttgcctgtggatccgaatgtgaccgtggaactcacacggcaggaaacctgaatctcaagggcaaaacaccccaggaaactctaattccttgatccaaagcatagggcaaagaaagttcaaggactgccgctaacactgccctgaccaccgcccggcacctgcgcacgatggccaaaatgaaaaacggcgccaaggccagatcagatcgtatccgtttatcagtggatattaatatacatagcattagttaccatgggagaagggagcaccgtgccaaatacatatattcatccatggtttgccatacacacgttgcagctcgaatccatggattcattcttctgccgttgcattccaagctcccgatcctgtgatcgacagccacatcgccttatagagcagtcatgccgggatcaattgtgggatccatccatatgcgcaagagctgagatcgagattcggacaccgatagattatcagcatccatagactttggatgttactttatttggtattacgtctgtactgataatacagagctctctgattggcccacggagaatctcggtgtaatcccacgccagtcctaaaatagctctagcgcagaaaggtacctgtctgtcggtacgcacgatggctgccgtcccctgagcatatccgcggacaaggtgtgaggtgaccgttcctcgggacttttcccgaagtcaaagcctccattttccagtgctgctaaccgtgcaagtcccttcattttcctttctgggtaattcgctccggtggcggtcgtaggggcttccggcgctctcttaggggcgccagctcgcgtggcaggaatccgcaggattctagttgacagggttgtttgaagtctcttgcttcattgggatgctctttctgtattgggtgttttttttctttgagggtttctaacggttgcgtaattgtttctgggattttgagttcaagtggagttgtttatggagcccgtactatctatcgtcacgcttgtactccgtagatgcacaaccgacaacctcaggggttattgggattattgacgtggtccttcctaatacggttgaggagttttactttgtgatgggattatagtttactgggacaatgcttagcaacggtggactagcaaatgttgatatctagaaggagacatggtaagtcttcccctttactgccgacagaagacaggcatactctgaatcggacattcgatctcaacatcgcgaccgccctcatacacagtatcttttccgtcccagagcttccacgatgccccagccggcagatagaccttgaccttgcgctgaccgggctcaaacacaggcacaaccaagtacttcgacccaaacatatactgagtctcgacctcccaagctggttcatccgacgggaactcgtaaaacaaagtcctcatcacaggagtccccttctcatgagcctcccgcatcaacccgcgcgtgtactcgcgaagctgctcgcgaatcccaatataccgtttacagatttcataaacctcatccccatatgaccagatctcattatccgccccgctagccgtcggccgtccctccggcttcggctcacggtcaccatgtagccgcatcaccggacagaacgctccccactggaaccatctcgtgaacagctcgcggaacgcaggatccttggggttgccgccgtggaaaccgccaatatcggtcgtccaccatgggatcccggctagccccatgttcaggcccgctgcgagttggttgcggaaggagctccacgacgacgcgatgtcgccgctccacacgagcgctccgtacttctgactgcccgcccatgcacaccgcaggagattgacgatgttcgtttgaccctctgcggtcatgccttcgtagaaaccccgggcgtactctttcgggtaggtgtttccgacctgcaggttgctgccggcgtggtagcggtagatatcgaagtcgtagatcgagtactcaggctcggcttcgtcgagccagaatgttttgatacctatgttgtagtagttttgcttggcttgactccagatgaactttcgggctgccgggttcgttgcgtcgaagtgtgtgatgtcgccatcgcattgcatcgctacgcgcatgccgcggtcgtgacggatgagaagcccttgttcgagcatctctgggaagttctcggatgcattttcaacggtgggccagatggaaaccatgagctcaactttgagctctttaagctccttgaccatggcctctggaatcggacattgttagcgggtcgtgctatcgatgtaaaaaagagaatgacagctcacccggatctggccagaactccggatcaaagctccattctccttggtgcttccaatgaaagaagtcaatgacaatcaaatccagaggaacctcgcgccgccggtactcgcgcgcaatttcgagcagctgctcctggttcgtgtagcggagcttgcactgccagaaaccaaggccatattctggcatcatgggaacataacccgtcactttggcgtaggcttcttcaatttccgcgggggtgtcacccgatacaacccagtagtccaatgccttggtcgaatacgcctcaaagctcatgatatttgttcccagaaccgcccgtccaatgccggggttattccagaggaagccgtagccgagcgacgaaaccgcaaagggaacactggcctgggagttgcggtgcgccagttccaggtccgtacctttcaggttcaggtagggctgctgatactgtcccataccgaagatcttctctttgcgatcgagagactcgaatcgcatcgtgaggtggtagtcgccgcctaggattggacgcatctcgcgagcttcgatagtcagcgcgctgcacttggggtccattggatccaggcggtggcgggcatactcctcgaggagtttgtttcccttcgaatcgtagacgataatcttgcctctgcgtgacacagttgctttgatcttgccgtttgtaatagtcgcttcttgatcagtagatatctcaatgcttaggtttgggctgggtggcttggaggagagggcccaatcttccattggaattgacgcctgtctcgttgcacgtacgcggaaggcattctctccccatggctgcacccagaggatatggtcgtcgaaacggaagatgagcttgtcatcttcggtgtagagcattttggtaaaacaagttgttagtggtattaatctacttttcctgatggaagaagaggcgatttgtcttaacagatgagctgtctagttcaaagagccgggaattaagtattgagggaatggaatggtacccctcaccatgcaatcctgatgctgtgacagggctaacaccgatgacaaggcagatccactgcatgaagtaccagtaacaacactcatttattcgaggaaacttctaagatgcctcaggggtggtgaggtggatatgtgtacctttaaacgcctcgagatcataggtagcatccgtcacgagtttagcctaaagtcggccttccaaatagagcaaggacatgactccgtgtcttccaaaagaggaagtttatatcgtatgaatgaagctgccacttatagtcttcattatgtgctacctatccgaggaaaatgttcaatgatagtagatgtagaaaaagtcattagcaatacgagaaattctttatgtgggaagttggattggaaatttaggcttgggagctgcagcatatacaagccattgtgtgcatatcgatgttaactagttaaatgcctatcgaatttggtgaatgagccaacgatacgtcttttatcatgaacaatatcaccacaagaactggttcttcggtaaggagaaataatcaaatatgtggcaatagttaggagttagcgaccctttaagaaaggagaaagagaaggcatctcttctgatccaacggtcatttcagctaacatattaccaaccacaactttgaggtaagactgctgtaggtaggccgatatcacagaacatgagtatatgagatgtagggttatgtaggattactacgatgtgctattatccttccgtggtctactattgctacgtattaacatattccggaatctcgtggtcattactgactactcagttctaaacttcataccttctttatctgaatttcaggagatcaaagaagcccctagttttgttctacaaagagagtcctttagcacataaacctatggcagagaagagatgttagggcttaaacaacttgtgtataatgcaccatggctagatctcaattcatatggtctatcagttttgttggaagataattccctgtgtttggccaatttatcactatagtcaaaatttgactctcactttcgccttaattagacgtttataagccaatacagcgtacctatgaggtatagtatttcggtgccgagagaccatgttaccatccctgtcttccaactcttcttttttgcttaaactttcaagtatcaaagcaaatcagcttgagctcattcgtaattcatcatcagacccaagattcaacaatactaaaccgttcagacgtccacgggaggttccttgatattgccggctggtgttccccggaaaaaggacgctattccttatcaggacagagagtcaagctaccagcgggcacggttttcatcttgcattgctcatcctatccccttaattgtcaatctcattcgaaccgctagctgagatcatatctgagccttcgattcatccagcgaagcctgaatcatggcattcagcggggccgccgaggctcctaccgcggacatggacatcgacatggacctcgacctaggaccagagcccgagcccgagctaattcaggtggtaagggtttgcttttgtctttatagctatagtcgattgtcaactaacatgtgtcgagtgctaggaaacaactccgaacttagaaatcaccgtcgaccccctcaccgatgaagcggtctacgaaaaagtgcatgttcgcggtgtcgatgaaatgaccacggagaatatcaagcaatttgctcgcgactgctctggacaggagccagtgcgcgtcgaatggatcgacgacacatccgccaacctcgtcttctcctccgccgaaatcggcctccaagctctcacagctctcacccaagtcgccgaggaagaagacgcgtctaccttgccacctctgcgtctccgatcggcgaaactcctctcctcccaccctgattccgtcctccaagtgcgatcggctgtcaagtcggaccgcaagcaagcacgcgctcatgagaagagtcgcttctacctcatgcaccccgagcatgatccccgagaacgcttgcggcaagagtttgcggacaggagacgtagcgatgatgcaggggatggcgactacagccggcgcagattcgacgaccgggagcaccggcgccgccgagaccgcgccgaggatgaccacttcaatgcggacatgtacggtgataatgttggctctgaacccgagcgcgctcggggaaagcctagaggtcgcggccagagagagctgttcccagatgccgagggccgatccagtggacgtctccggaatcgcagtgcgtctccaggacgagacacgttggaggaagaacttggagttaatcgaggcggtggtgataataacaggcggttccgtgagaggtcgcctagaggtcgtaagaacaaaagtaaagagcttttcccaagcgcgagcgagagcgagtcaggaaaccgcgagcttttcccaaacaagcccacatccagctacatcaagaaagagttgttgcccagcaaggctagtcaccatcgccggtcagatgcattcgacgcttcttctgccccgggcacctctgaacacagacgccacagcaatattgagctcttccctgattccaccaacaatggcgcccgcattcgtggagcagccacaaccaccgaggaccaaggatttgccatccgaggcggctcatcgagcggcatgtcgattaaaggcaagggtgcgtcggtgcgcgagctgtttccttccaaatacgacaatggcaccaacaataacatcaaagttggcgccaacgctggcaaggaattgttttctgagacactagagggacgcggcggtcgtcggcgtcgggctgaggatatgttcagctgaatagactaagcgataggccgagaacttgtgcatttgcttgattatgaggcttcgggagcatggtggatatccggcgtttcaagaatgggatggggaaatcgattgtctgataaaagtttcataatgaaacatactctgctctgctgatgggtggaacccgtatattttctgtaatctccaatataacgcaaaagaagatatagaccaaagtaacattagttgagtcgtgcatgggaatatatatacaagtcgcgttgtgcgcgactaactctccccaaccaaaatccttccgaggcatcagatacaagcatggccacctccagaacaattgatgcactagcaagtgctatagttgcgcgattcctgcgcaacaatgactattcagagacactgaaggcttttatccgcgaggctgaccttgctcctgacgtggggcagacctcgggcgacgacaccaacaactggaccatccaaagtttgcttgaagagaagagcacatatgaccaaactgtgaattttgaaagatatggaaaaggcaatcagcagtcgactttatggagcgagccaggtgggttttattccggaatggcagtcgaaagtcattgggactcggcctagctttaactatcagcggttgcctttgttctggtatctgacagacttctagcaccatcaagaccttctatcatccagacaccgacatcatcaaatatccttgctgcgtcggtagagcaatggcagaaaccccgcggcgatgccgatcaagtcgccgcagacgctgcaccagcgcagtcgtatatcgtctccacgggtgcagacaggcaagtacatttactccagacggcagaaggtaatacggctgtcaaatcattctcgggaatctctgattcgcctgttctatcggttgtctcgatcctccagggccagtacatcctcatgaccaacatgtctggacagctgctcctccagcatggatcccaaacactggacagcaggaaggaccacgcaaagtacgcagtgaaggtggtagtctacaaagacaaggctgatccttccaagtggtgggttgccaccgccgggtgggacgagtgtgttttcttatattgcctcaatattcccgacgaagtagacgcgctatctctcacaattggtgagcccgttgcacgcattaaactcaactcaaacccggattcactattgttcgtcccacacgtggacaccaacgagctgctccttctcgtctcgcgcagagactcgacttatatctactactaccaggtagaagcatcggaagaaaccgatactcgtgcaaatgatgaacccgctgccgagaagtcaccgcgggaagctcgcctccttggacagcagaatctggccccccattccaatgcctgggttgcgttctcgccggtccacatggcgctcagtccacacgacccaggcctcctggccgtagcgacgtcgacattgccccatttgaaagtgatcatcgtgcgtctgctattccctgcaacgaccgcttcagaggacccggtgacacaggcgtctcaggcactggcaacactggaactgcagaaccgtgaggatgctgctatcctcgtgcaggcaaacaccttctcgccgcaaactgcttactccacaccgcaagtggcatggcggcctaatgggtctggcatctgggtcaatggagatgatggtgtggttcgtggcattgagacgaagacggggaagatcattgctacgttgaagggtggtcatgactctggctttaaggtgaggactgtttggtcgggtcttgttgctgtaccccaagaagagggtgacccggtctgggaggaatgggttatcagtggtgggtttgataaaaggttgattatttggaaggtatgacctttgtgactataccgaatatccaggccaatacgagtgtcatggacgtgaaagcaaatgtgaagtagaggtaaacgaattgatttagacataactaaatataaaaacgactgttactgtctacgggatgtagcccccctgaccatgaaccctgtcgcatcgagaagaatcaagacaggatatatagcaatcggggacttgggggttcttcttggcacgttaagaaaaaatccttcagcaatcgcgcatgagaaaagcacgcagctgtacacacatatgccggacgggagttctgggaaaaggggagaaactaagctcaagggccacaacacagacgaagttgagtcctcgggtctagaagaaaaaaaaaaagaaagggatatagcagaagagattccgcttgggaaaatggcaccgctgtgcacatcgaattaagcctgttgatttcctgatatcaaacaactcgaggctcgtcgcgcaagaaataagcaaaaatcaggcctattcgacacagcggaccgtccttgatcgtcacacacgttatgttctctggacctcttgcacgctcgagttgcatttcatgtttcccatttttttaagactgagttcataatctatgcgacctcgcgcttgccctccttgcgctccttctgttcaatgtgtcagtactccgttccataggtaatggatggtgggttcgggttgtggtcaacgtacaagggccttcatggtgccgtggagagcgtgacggtggttgcggcggaacttggggtcgacaccgttgagggaagggtaacggttggtcttgggcttcttgatactgttcggacaaatatatcagcgactcgattcagggtgagatggtgtggcggatggtggtcgaatgcagtggttcgaagagattgcccgggcgaatattccaagtcgttgacctcaagattcatcacgccggataaaaccattcgcacactagcacttcttccaccatgttcattggattgattgaaaaatgtcggacaagtgtaatagtagggtgaccgaggaagttcaagggcaaacgtacccgttacggtgagccttctggctgctgtggtgctgggacgcgttcttggactctgtaggtgaaaatcatgtcagcgccatcgcctttttttcttctctctcgccagcttgcagaggagcgaaagtcatagggtcgtggtaaaaacgtactggccatcttgtcggatgttgtcgctgattgacggtgatagatggagaggagtgggaatagggacgtcaggcctaagaggctcggctagggctcgttccgtttgtgggatctcgcttattgggcggtgtacatactacagcttcactaggtgacttcttacttgcaagattgtcccagaaaacgttgtgctattttgattggtcttgtatcctgttatatttcattttgccgttctacctggttggaaatcggggtctttttaactcgcttttagcagttcttcagtccgcgagtttttctcccttcattctgccacttaatacacgtgacctatatatatatatcacgtgccagatacttccaatgctgtctacgaggtattgaagaagagatttgatttcggaggcgacttgatagtagcaagtgcagtatacagatacaatgtattgtgcctgattactcttagcgagaattcctgcaccaacttgttctcggccgcaaatattacattaggaatcggagttctggcaggaacttatattctaaaatggataaatactaaaatacatagcacaggaattgaatatgtgttctctccttgtgttctcaaaatatgcatacaatgactgtagccaacgcagctcatactggccatggtccggccgttgaattcccgtgccacgtgacccgccgctagggaacaaccggcattccgacttcgacctttgcaacgcaacttcaagacggataatccagcctttgcacgtcatccaccactgcaaaatgagctccttccgctttgctcgctccgccctccgggctcgcccttctttcctcggtgctcccgtccagcgccgtggttacgctgaggctgtcgccgacaagatcaagctgtccctgactctgcctcaccaggtacgtgaacgaagtccggccggcatcccaacatcatagcctaagtactgacttgataattgcttgacagaccatctaccgctcgactggcgtgtatgttatgcttccaattgcgcccgcgtcgacggtgcctccgcccttttcctaaatactgaccaaccttcgcgatcacagtacccaggtcaaccttcccgccgcctccggtgagatgggtgttctcgccaaccacgttccctctatcgagcagctcaaccccggtctcgtcgagatcatcgaggagagcggtgctaccaagcagtacttccgtacgtccgatctttgcgctctgaaacatttcgcaaatctggtctcttgtgaattggaatcaatcgactaacaacggtgctactgtatagtgtccggtggtttcgccgtcgtccagcccgactcccagctcagcatcaacgctgtcgagggcttcccccttgaggacttcagcgccgatgtaggttttttttttcctttccaatgtcgcgactaaagcttactggagcttccttactaggctatccgcgcccagatcaccgaggcccagaagattgccagcggcagcggcagcgagcaggatatcgccgaggccaagattgagctcgaggtatgaacccgcgggactaccggactggttaattactgactttccttttcttgaacaggttctcgagagcttgcaggctcacgtcaaataaatttgatgtacataaccattatcgcctaaaccatgaacctgtagaattatagcagttctcccttccctctaattatacgtgtttattatatctgtctacattctatgcggtagaggcgggagcgcaccttccaagcttggaagttaagcacatgacttgcccatttcatctccaatccccgacccgacggtcgactgttatcttcagctgaccgtgcaaacatggcattcgccaaatcactcaagtcagaccctctgggcatggtggatactcgattgatgatgacggactcaccaatggatggtttcttttcacctctctttgcgccattcaccgggcttgatggaactgacgaaagacaaccaagcagccgccagccagaagcagaagcaagcccgaagcaagctcacggaagcgtcgaatttcgcgagtctttccgtggtttcgattccagccgaaaatgtcctcgacttgagttggatgtcgctgtggataagtaccacgctcttgacggtctcactgaaccattgaatccccaaaacacccccgcatcaaatagcgaacgagggagcatagaggaatctactgagtcgcttcgatgctataaaatggagaacgtacagacgagtcctgcgcctgggacgggggagttcaatttcgattgcttccaagattcgccagaggcaagctttgtttatcaagacgacggaagtgaatctcctaaaccctcaaagttgcgacgcctttcggttggccgccgacagtggatcaaacctcctgttactgccctggcgaatcgtcagccaagcatgaatgccggtgacttcaagaaatccagcaattctggtccactaccgcgatgcgttcgattttctcctcctgcggcctctctgtcttcgccttctcgtgcgacacgtcgtcccctaccttcgattgaaagaagacaggattatgttgcttttcatcgacagaagaaacaacaccggaaatggaagatcactggtcgcgcgaactctcgaaaaagctcaccatgcaacatccctacaaaaagaatcatcccaaagaaccatgatctgcgtgactcgtctctttgcagcttaacctatcgtgaaacaggtcaaacaactctccccgctcgtgttggctcgggtagtgatgcccgggaagtgagagccggcaatgtgggcgacactcctgttgcagatgactcgaaaataacgggtaacaccgagcagaacatccctgcatttcttgctgtttcgttttcgctttacagaaccagacctgcgcctagctcatccattgagaaagcatcaaagtacgcattcaaatttcgaatgactcgaactgatctccctcagcaaccttctccgcatttccctaccgaatttgaaaacatcacttgccacccgatcattgatgacttgctattacacacttgcttcatcatcccggcgcgggttgtactattacctctcaatgtcatcttcgttgcaacatacccattgacaaacacccgggtcggcgttgtaatgctctaccttgccagagctttactgtatctactgacgagaaccatccttcttgtgttgtccaagtgcggagtgtcttgtggctgtcagtggaacccggacacggccattcggactcagtagcttcacccttagggtgagcaattgaggttgaacaagatcgaagcgacatgtgcaccagcgaattccgttcgtatttcctccaaagacagttttatgcagtattctacgcgtaccttggttcacgcgggtgagaaatgagtttagtcactatttgatacatttttgtggccgaaagccgagttatgggtaggaatgaaacagatttttccagaatggagtctcttgtattagtttttagtagagaaattcccactgaactaaagtaaatgagatgagaggattcaattgacttatagggactctccatgtctacataggtcactatcatgacgggctaccaagcaagcagttgtcaagaaggatgagagataataatgaaacaaaatgaattcaatctacacatcgatgcacacccccagagctaaccttagcactcgaataccttgctttagaataaaaaattcacactttaatttcttgcattacaaaattatagaatcgatcctatgcagtctcttctcgctttgaacctccattgattagccttaccacagcatgttaatcttagcgaggacaggccgcaggatatcctgttttgagctgaacatgagatagtcagaaattaggcgttagattatttgtgagggcttctaatctccgtgaacaatgtccgagatcatgggcatctatacctaaggttcaatgtagggtctactgcacagaatattgttcgatattaaccgcataactctctaagctgcactcggttatgcctcaggagaaccccaggaagaataggacagataaccaataccaagaccgggtatatcagcacaaacatgaagacaagaagaccagcaaaaagctagctaacaacccaataaaagatcctttaaatcgctgacatcataaaaataggaatgagaaaggaaatgctaactaaaaaaatcatttcgtcgcctcaagagcacatttaagaaagatggaaaacatatcaaaaaggcatagtaacgtgacataaggtttggggggagggggtcatttatatcaacacggctctgaaggacataactcgttttgtacacgtcgtaagctgagtctgtagtagacacaagagagaaaaaagcagagaactctagacggtactaagaaagcgatcacgtgaattccacaccgtgctgctgctgcctctcttgtcgggtccgggctcgttcagcacgtctgcggcgacgattgttcgcgtaagagccgctcatctcagtaccggtatatgtaggcgaagtgacactgcctggcccatatgggttgctggaaggcgcaggaatgggaggtggcatgctgcctgaaggtgcctgtggaggggcaaggcgagcagcagcagcagcctgttcacgtcgcatctgctcgtcttgttgacgttcgagttcttcaacgcgacgccagcggtcgtggccggcgtcttcgttgccagacaaggagcctgcactgctgttgcgacgtcgagagcttcttcgctctctgcgacgggcctcacggctcgcggccgcttcttcttcggtcagccgacggagtgtcacatgtcgtccgtcattgtgcattttcactttcacagataccggcggggaggcaacgtcgtcctctcggcgccggctgctgctccgattacggcgggcggctgcatctagtgctgccccagcagccgcacctgatgcaaattctgctccatcatgggcgagagagtgacgtgagtgaggatcttcagagaactgctggtggctcgggggcataggcggcatatctgatacaacgctatggacagcaccagaggcgagtggctctgcagtaagaagagattctccatgtgatgcgtgtcgaggtggaggacgggacagatcggtttcagtgagatcagtttcactatacgaactggcccttcttcgtgggtagaaacttcctcctgtctgtggccgtcgtttgctgtttgctctctgcagcgcctcatcttcatcttctcggcgcctgatatcttccagccgccgtttctcttcatcgtcctttttaccgcggctaaacagtcgcttcacggcagcaaaagcacctgcacccagaacagcgtctctaaccccatgagaagcgtttcgcttaggaggctcagtgagatatgtgctgttgtaatagtaagacgaccccgggctttgggacctgcttggtacacggctcggtggtcgattaaggggcgtgtggtgtgtcggctccggtcgaccatcttctatcctgctgagagattcatccgtgtggctagtactgcgcgaatgggcgggtctgtaacgacccgattcggcatcatcttctcgcttttttcgacgattccagaaattcttggccatgagaccagccccagccagtgcaccaagctcgaggagtttcttgccgaaaccaccaccaccatgatgacgggaagcttcatctgaatatttttcatcagagatagatgtgcgagagtcttcataagcatggcttgggtggcgactgcttgaacgccgtcgaaacattgaagctaggccagcacccgcagcgccggcggcgagagcttctgccgcatgattgccatggtgctctgatatctctgaaggtcctgtataatgactgcggtcatcaccgtggtcacttcccatgtggtatccttcaaagtcatatcggtaggaaagtaaaaagtaaagaaccaagtagccgaaagctgtcagcgcgaataggatgaataggacctttggcgaaccgtagagcgtgagtcctagtggaatttgagcaattccgagaagtagaagtgcacgacccagccaccggtgaacctaagacatgttagaagagcccttatatcccttcttgagacttcacttaccaccagtttcaaaggaacgtgaactcgccgtctcttactctctttcttgtgcacaaaccagccccacagcacctgaaaaataaccaaaacatagattgccaggccgattccatgatgtgggttggttaggcttctttgtggcccaacggcgaaccacccaagcacaaacacaaccgtggtcaagagcagggtaagtacctggcaccaagcatgcaatttgaatgcccagtaaggattccatcgggagtaatatcggattatgaaagttgatattgggacgatgcccaagaaaacgattgttgcaatgacgccgtgcgcgatgattatggaatggtacccggccatatccttgaaacggttccccatgcctgtaaagtgtcagtcattacaagataattgaaagggtgtacaccattatgaaagccgattgttgatgcgtccgactaaccattgtatcgcatcgtctcaaagttgacccccatcaaattgggcagtaggaaggtatcccgcccagagtcccaggtgccatccccaacatgaagggtattggatgaatatgtgctgctccctgcagcggcgagatctgagtttgacattttgcggataattctcgaatgaccatgcgatcttcagtctggaatgtcagatttaccgaaggagatctttcgagatctcccgatccgaggaatgcaccatgcgataatgggatcgagatttcgactggaatgcccaatgacagtcaacgaaactgattgtatgttgaccaatttatgggcgctggactgatcgtatcacaagatctaagtatggttcgagaaagccgtatagtaagagtcgaggcggagcgcaagaagagggaaagaaagaaagtcgtacggattcggatgtgagattaggataggattgaaaaagcgtccgacaacgagattgacatagaataataaagatgcatgtcacacggaaacatcgggcagagaggaatcacaacaagaggctgagcgatttccccagccatctgttttcctatgacaaattaccgggccaaccagccgctgactcagcatgggtattgtaaccgccttccaaagtcggttaggctgttgcctcgttatcttatctgccttatcctcagctgatcttatcacaagattgcgtgctgtgttcgatggagctcgaatcgttacatcccacaccttctcttcttcccccgcctgacactttggaatgagtagcctcaatccaagatgactcctcaactagagatatttattagagctttgtcccggtttgtgaactcctattcgcacccgaatgccaccgggcattatgaacatgactgactaatttaccctagctttttaggatgggcatagtaagtctacgcgttacttccgaggctatatcttatatctcatgtgacgtttgggttgacggctaacttgaacgaagtatgctctgctggtcggggtctttttatccccagccgatcaccaactggagacgcaagtccacagtcggcttatccattgatttatccaccatcaaccctctgggttttgtctgctatgcgatatatacctccgcgtttctctactctcccgtcataagatcacagtatgcggcccgccaccctgcctcaatcgaacccaccgttcggttcaacgatttcgcatttgcggcacacgcggtggtcatgtgcatcataatgtactcgcagttctggcctttcatctggggcttccacgtttcccgcttccaaagagtcagttggttaatggctggaatattctgggggtgtgtcctgtctcctctggtggttatcgtggccgtgttggcacaaagtccggatggagggtacgatccttccacttgggcgtggattgacgtggtaggtgaaaaaatctacttttcttcaatgaactcaacggggaaactgtaaaacaaagctaatatccttctagatatactcgttttcgtacgtcaaactcctgatcaccattgtgaaatatatgccccaagtggcgttgaactacaaacgacaatctacagtaggctggaacattggaactatccttctggatatggctggtggtgtactttcaatgcttcaactggtgcttgactccagccttcaaagtgactggagcggtattaccggcaacccagtcaagctactgctgggcaacgttacaatcttcttcgatgcaatcttctgcatccagcactacgtcttataccgagatactcctgacctgaagagaacatctggtccgagcgagcaatcgcccctcttggatggacaagacgatactgtgggagatcgagtatgatacacagacatccatgagacgaactagtgaccttggggccggatttgagacattggggatatgtgtctatttttgtagaggcagtggagtctgatcttggatctttgagatattgtgggggcggaaatccggaccacacatctcagcccgatcttggtgatctgacgatttgggggcttggtataagccatgatttagatacatgataaaccgtcctatcatgaatgtggtgctatatatttcggatctgagacactatgccaaggaatattattattagacggaagatattcggtctcaccaccagcgtacaatgtacaacgtgtcattctggaagcattcaggtcgaaaccctcccagacaacgtgtcgcacaatacaatacatagttataattcacatagtgactgcataatagacccgaagccacagtgaggctcacgccgatcaaattgacaccgctcctcaatttgaacggcctccccgtatttggcccccaccgaatgatgtgagtggtcgaataaagggataagcacacatttatgaacattgaccaatcatgaaaaagaacacggtctatccaccagtgcaccaacggtgctagccgtcggtgtcgtgctaaaaaaggcttactatcgtagctgaagctgaactctagattctcagatttgacatgagctcattgcgatacctgggttgcatccggatcaaccatacaacatacagaactgccctagagtgactgatcagcaagatatcaaccctagctccctaccagtaagatacccctccacgcaagagatgctaccttcggctttgacgttaccttcaagctgactcaaccttcagaaacttgaattaaaattatggggttaaggagtcggaaattaataacgtgccatagaatcgggaattatgtgtataatcttaggcataatttgtgtagtggccatgacagtgaggctcttgatatctatgaggatgaaccatttccacgtgtttctagagaacatgcacaaaagacaagaaagatattacagaatactataacacgagttttggtgatccctagcatcctgggcgtcttgtggctttctattggccagtaatacgagcgcacaacgcagaccctagaaatatcatagttgattcatgaaaccctaatctctggcagaaacctgccggtcttggtctagccaatcttggtatgtatatgtgcagacccacggcgtcatctttcagccctactttgaaaaagcctgttgtcctatagttctgaaaatgagaagccaatacctgcaagccctgagtgggtcgaagatcatctctaagccggtagacccccccagccccagtaatccagccattctgaatcactttgagtcaaccccaagaatcaatgaaacggtatcaattgatcattcggtgcattgccaataataactggtacagttaacaattctatatcaagcatagcagtatgatcaagtttcaatttcttctgcggaacgcctagacgttcaggattacagcactgcctccttgacttgagatggccataaatactccactgcgagtttcttcttagtctagaagacaagttcagctctaaatcagcaaaaactctatgaaactttggcttctcagtcttatcgggcaaaaaaacccaagcgcatggacacttgttcatacatcctttatttatgagagcgaaatcatactaagcatccattgatatgcaagagcggcggcccccaaaacacagctttgcatacttagactgggaattctcttttctatcctcagaggaattacacaacatcacctacgtccccaacgtcaccgacatcgccaacatgtatcctagtcctcagaagtctaaaagtacatatagcactgtgccggatagtgctggctactcggagtcctcagagcctcaacgaattggaggcttggtcgatgtgcctacatccagctctcacatgtccgttcttcagcagatagactttatgaatgcccagccaaatcctcggtccttcttagctcctgggcatcattctaccgggagaagggaatcgatagacactggtacaattgggtctcaatatgcatggtccactgcgtctaacgcaggcgtcctctcaaactcttctcatatgccctcctttgagacctccatcgaccacaacacaacgcctttcattcaaggttactatccccaggaatctctacagctcgctatgagtggaccaggcgtgtcgggctatactcctcagcaaatcgacaaatggtgtgttgagagcgagccagcacaagacttctaccagccacaacccttccaaaacataggctctatgcgttttccaccatcaacagaagtgcaaccagagccgtatgcgacattcaacaaccaagtcaatactgcgaacgagcagtggctctcttgcccactccattcttctgatccgaccccagaaaccttcttccaaatcccccaatccgtctcaattcctcagtcaaatcagtcagtcccagcgccaacaacccacctctaccaatccactactacgaccacctcaatatcttcatcgccaccatgctccctctccgacccagattctccaccagccgcaccgggctcggcttccggcttaggctcgggctccaacgcaggcgatttaagcaactacggtattccaactggtgacggcacctggcgttgcgcccacccaggctgttcctcgcaggctgtcttccatcgaggctgtgatctgaggaagcacttcaaccgccaccgcaagtacctcttctgtcgctacgagggatgtccccagtctacaaagaatggctttagcagcaagaaggaccgtgctcgtcatgaagcgaagcataatcctggtgtcttttgtgagtgggagggctgtgggaaggttttcagtcgtgtcgacaatatgaaggaccatgtgaggaggattcatcggaaggggcaggctggaagggcttagtaatcggcgaggtcaccatgaagattatggtactttggttcatgtttacccggcggttttttttttgctattttgtttgattggttcatgtacaacattggtaggcaaagcgggaaaaggcatggcaaatttagacaatgaacggttctgtttagcgagggtttaccttgtccatgaaagtttaaacaaaaaccatacgaaaatgtatagttgcactgcttgaatgctagacctgcgtatgaggatgtagatatgcaagtctagaattagactcgagcattgccgagtattctaccgccgtaagaagcgactaaaaatgcttgattctaattttaacgccaaataacgccctaggccagactaatatcaccacctgataataggaatattgaaaaaaggcctgtgtaatcgaatacccgtgacccgtgatcatattatgcatccgagacgtttacgcagaaatagaccagatgaaacgcgcatttcccctagatctattaataatgcaagttactcatcaacaaacagtatgctatgtttaacctccatcatgcgagttcactgctacttagtggaggctatgtacagtggcggcaggcatagagtgaaaactaaacatgaatgcgggcattgttcgattgcattttctatctagggtatccaggtaagaatttctttcttatggtatgtatgtctcgaagctagtgcaatgatccaaattatagcctttctatatcaagaccagacgaggcgaggtgtacttcgtccattcagaacctattaaacccgcctccgcacgttggttgctgccaaataccatctaattagtaaaccatcaatcccaaagaatcgtcttctttggattcgccagctatgcaacttggataacgtggctagattcaaccagaccagggcctccgtaagaagaccaacccagccaggccccggcaacacacctgcacccgaaggatgttaggggaggctgacagcataattctgagtgatgtacttggtcttctaagggtgtgtttcatcaggtaatctgaaactttgggcaacccaaggttccaaggtttcagcttcgcacgtgttccaaggttggtcttggaagcttaactctatttgaaacgtgtatgaaccccagtagttcaggaacaaaagcatttattatagatctctgtctgtagccattgggctcgcacacatccatattttgtgtagatgctcctcagtcgaagacagacttctcgccgtgcgtgcaatatccttgggtgtaattctgcgaatttgtggtcccattaacgcacgaattccctggagtccaagatcccaaccaagcaggatttccagagacaggagcgcatatggtagtcttgtttgcagtatcaccactacgggactcatgaagccaccctgtaatgattgatcgaacaagccaataactattatctgcatgaccactgaacttggtcatgttgtaatgatcagcatcaatgccgcagctctcataaccccgcagaacagccgagtgctcttcaacgatcttgcccactatatcattcatatctttcgattcgtagaaacagaagaccttgagggagaggtcgccgcaatggagcatagactgaaactcgtttccaactcgttgtacgtcgttcgagcccgggtggagagccccgaccatgtctctgtttgcggtgtggactatgttcatcccttttgcgagtttctctcggtaagaagcgagcgaggacccgtactgcggtgtgcccatgaagattatcccgatggcgcttgaagatatcgcccatagtccgtctatgtagttgctgaggatcagggcttgttggcataccagaccgcccagactgtgcgcgataaataggatgggtctgcttgagcactcgattcgttggctgacaattgcataggctagggattggctatggtcgtgcagtcgatctgagaaggtaatcgaggaaaaactgaatatgtcgacgtcgtagccgaaggtcatgatgcgtgccttggacaagtccttggaaagaagatcccggggccataaggttccattttggtgagtccatgttttctcgcgatcgccggtcaatccatggataaaaacaatgctagtttagtggatgtcagttttcatttcttctttgttcatctaatttgggctccttcctggaaagatgaactcactctaggtcagcatctgaaggatcagataataccttcatcccaattgcaccttctgtggggtacctcgacattattagctcggtacctcgtttatctattacgaaatcttacagactgtattctggaacactgggtttcgtcttgctcctgaatagcgataacctcatggtggcgaattatatgtacccgaataaaacaaacaacataagatagcaagatagagtcaacagaagaggcaaacccggatggtaagagagttttaaaattcataatcctgtcggttaaaccacccctgtctggagctgatgacccactggattacacaatgtcttaagtaaacacatttcttaacaccgtctattttacgtccatattgaaatcattacaggtaacacagaaatatgccgattaagctggctgcgttttggctggctgcgaacacgaacctccatgagaataaatcgggccggaaggtcttggtagccccacaggatcgggcgcggaacttttatatcgtaaatggtggaatgaaccgtagatgcatgattgggctcgtctcaagcagggctgttaagataccctagacttaatcgggcattcccggccgcgtggaccaaccggcatattcgggcttctctgcgtttgcatttgagatggtagagagacttgggctctcatacttgaccgttctgatgattatcgctttattcgagaatctgcagccactgggacggatatatagactaattattggatgcttcttttatcaaaagttcgtagtcgtcaatttccaccttcccactttgagaattcggattgatgaaaattgctcttcttacacgtacaatcggcaagcgcactgcggccagcaagccatcaaaacctaagccgtgatgcagatgcagtgactatgcacctaatacagcggtgggtgggttcgattatggcgcaagtgatagacggaagaaaggccctaggcctggatcattgcgataccctagggaagcacaacttggtggctggggaactcttcgaaatggtgaggccatggaaccgatagaaaagtgcgtggaattgagggaggcgggttatagtccggcacccggacttgattgaaatcaccaccaggttgatcgaaggccagaaggttgaatctcaaagggaatatcagatcagattgaccatacgcgaatttgaagaaaagctggcaagaccaatatcaagttatggtgcatcgggaaagagacttctacccgagtgtgattttgaaaagtcccaagtaaagtgttcaacagagggttcatgataccccaatgaattgacaaagaagataaaatagtaaaaataggaaagactcacaatgctccaattaaacgaatggcccatgtaacatcatgaatttctaacaatggacaggtggtatcattgcagaagcaccaaacaaaagtacccaaaggtaacaaaataaaagacagcaaaaaggtatcacagctgagaaattcgtcacgcgtaaagttgcaaagttacctcaaagagggattagcatgtcgtactgaggcgctaatctggaaatctggaacacccggggaacacaggcatgaatgtgggagagagggggtgttggagagggtacacgccggtcggaacgagtgggatagaaagagcatggacacaatagaaatgagttggaaatgcaagatgtaaacaggaatagaatgaaaaaggataaagaataaacaagaggctaaaggttcatgtattgttcatccttcgttttctcccgcgggtgctaccaagcggccgttgcgcgagaacctgtcggagaatgggatcatctttgtttttgtcgacatgatgtacacgaacatgtctgtgtgagcgtgagttcagctgatatcagattaagtgaggctcggatgtagcacgaaccgttgaagattgtcgggtcgcgggtatttgtgttgctggtctggacagaagggacagacgtagcctggggagttgtgcacgaggccatggcgcatcatttcattcttacgcttgaaaccttttccgcctagtgcgcgtggacagccctctaccgggcagaagtgtgggcggtcttgtgagtgcacgtttgcatgagagctgctatttcgttaggtgggggtttcacttgagtcgtctctttggtcttacttgaggagatattgagtttggaagggtgcagcagtgcagccagaatgtgtacacctgtaactacccagggggccattggcctggggagtggacgcagcaagcgaatgccgatcacccatactagcgccaacctgttccgtgggtgtagggtaactggtcgctggattctgggcagtcataggggaagcgtcgtacggagtctggacagacagcatctcagaatgtggtggtccgcgccagaaggacgagtgcgaggccggagaagggttggtaggtgagtccttcatgctcaccggcgagaagtgagaaaatggacttgcaggaatggaaaactttcctggaaaagtgcggtcgaatggagaatcatttcccgatgtacttgatccgggacaggaggagaaggggaagggcgatgacattgtgttgactgttggggcgccgaagtctgacaatgcgctgagagctttgtgaattgacggcagcgtttgtttattgctgtctggagactttgcaagacacgatccagaagatgattggatcaattttaatgatgggaggggaatttggggctctctttccggaggagttttgagatggggcaacacttgttggggtcgttgaaccgagccacttaatgattgaagtcgctctcttggtacaaactcatctttcaccttattatctggttgtataggcttgaatgggagcgatctcctccgggggggtttactcttatgtgaggccgagcccgagactggtcccggggctgccttgagttccggttttgattggccctcctttgcggacgaatttaacctctttgaatctctgggatcaaagtcaggcggctgtttatgattttttagattcccgggtaatggttccaatggagaaatccttgccgccgcggcaatctcagggtggtgcggagctagatactccatcagcactcggtcgccctcacgggttgagttctgaggtttcagctggttgggcttacgagaaccctctgcgtcggcttctttttcgctcgcggaaacaaatggtggtagtgtttcgctttctccatagttgggtttcatcgcccccccacgggnnnnnnnnnnnnnnnnnnnnnnnnnnnnnnnnnnnnnnnnnnnnnnnnnnnnnnnnnnnnnnnnnnnnnnnnnnnnnnnnnnnnnnnnnnnnnnnnnnnnnnnnnnnnnnnnnnnnnnnnnnnnnnnnnnnnnnnnnnnnnnnnnnnnnnnnnnnnnnnnnnnnnnnnnnnnnnnnnnnnnnnnnnnnnnnnnnnnnnnnnnnnnnnnnnnnnnnnnnnnnnnnnnnnnnnnnnnnnnnnnnnnnnnnnnnnnnnnnnnnnnnnnnnnnnnnnnnnnngcctcgccccgaggggaggggaccgattaaaagcatcatccgaatcatacatagcggatgtcataaagaaagtggcaggtgcatcgggcacctcgccttatacttggtgttggtctgactgattgaattgacgatcacacatcaataagtctgtaagatatggttagagaggggctgtaattgtgacttggtgatcggatgaatgagaagcacgagctaagtgcatacaatagaaaagcagaaaagcaagtaatgccgacaaagactgtccgtggttaaagtgttgagatgaggagatgaggggttgtcaggtcaggatgacccggagagaataaaacgaacaccagtcggaaaccaaagagacaagaaaatagggaaagtaggaaacgcaagaaaaacagaaaagaaaaaagaaacgagaccccgaagctctagactactcagtttcgaggtctgcagaaagtgcacttacccaagcggaaaggtggacgggtagtgaatgggtcccgggatgaggcttaaaagctccgattgtcactgcgccatctgcagatgaatatccctcggaaagaagcttgcaggttggaaactgtacaggaactcttgcaagggaagaaaggaaaactaagggagaagttgtaggcttcggggaaaaaaaagagaaacgagtctaagggtgagataataccacgttctacacgtgcaagttagggcccagcaatatctaccagtataatgccagtaatccgacggccaaaccagaaagaaagaaaaaaagcgtcaaccgagaaaaggagaatcaacgtccaaggaatattcgaggggggttgggagagaagacaataataatgcggctctcgctctcaactcggagctccacagaggaatagattacccgttacgttaccgtgactggtatttaccgggtttcgatttgattattcgggtattctatttcccgaggtttgtatttttgcgtctggtatttttctggtatttttcgagtatttccgtatttccatgatttcccttctcatctctcgatatcttcacttttcaacttcctctcggattccctgaatagtctccatccctcgatccggagcatttgaacttggtcgcacatacaacataagccaagggaaaaaaaggaaagaaatgatttctccaccgctactctctctattcaggctccaccagtaaacttggagacaacaaccggggtgcaactctcaagtcgtttcccctctatctctctccactcccaagtctgttatacccggctagggaacctgcacgaagaggggggcccacacggtctgttcacttttctcccatttcctatttcctctttcctctttcctctttccgtcccgccttttggtcctttttttacctttgcaacgtcagactcactgcgctggcacgctaacacctgggagcctcgagccgtcagcccgaaggatcttcaggctgtcccggttggattgtcaacgcgctgtctgcggtaaggagatcgtccagcccacgttgtttcagagcctcgttaagagacaatctttctatactactagtatagttcgatgatcccacatggtacattctacatggtgtataatacccctaactataatccacgtaactgtaatactacgctataccacctgcatacatagatgtgctgtccaaccccagtcggccacactccgaaacccctaattcccgaattcccttaattatcccagccgcatcccctcacactagtggattgtggataatcgagaatagattagttaatttgaaaccgatgcctatctgaatacctaaccctatcccaaacctgctattgaatcatgtttccttggaagtctaagaaaaaaataagaagtggagttcttcactccctcagcctcacttacacgtagagccgcagggcagataaaaaaagcctcacttttttcgctcctttgcatccaatcataatccattgaccacttgtctgcccgcagatgagctcaacggacattacacgatgcggtattccaccggtgtactttgcttctttcttttacgttacttgtacttctgtcttacaatcttttaatatacgtactttgtattttggtcttttctttttttacccgactcattacttgtatatctctaccgttttacggagtactcaatcccgctcggtagtgtgatcggatgagatggcgtacattaaacgtgatatcctcgcaggatattataccatacgttctcgaacgttggtccccatcgggataagtgcttacgtccacacgtcaggcgcgccaaaagtacttgactctagctgttctgggcttgtactccgtattcggtacataacctccatgcacacacccatagagtggggttttgattgtttcatggagagttggttctggaccagccttacattctaataagctgaagaatccgatttagattcagatcggctcatctcaacctacatgtagacggcgctagaatggaataagtgaagtccaggcctcgattctgagtatatacaatgccaaacctaaaaccatcaaaagcttccccgcaagtagtcaaatctctacagagtgtaagaagactacaattttccagcagaagccctcttcacaagctgaaccctctcccaagccccctcagcaaacggttttgccctcttcgcgtaatcactagccctcgcactactagcttgtctcccagcgaaccgggccgcaatgccctgcataatcacggatcctcggaacgcaaaaaatgcatcgccccacgccacgtccgagctcgtttcgtacccagacgtctcggcgtaccagccaatgcactcctcgcgccgtggcagccctggaacaacccccggcgcgaactgcgacagttggctgtccccaccgtcgattatgtaggggcttgtgaggttgcagaagtctgacagggggtgtcctacggtcgccatttcccaatctaggatgccgatcacgcgcggctccgtcttgtggaagatcatgttgtcaattttgtagtcgccatgcacgagggtgccccggtccagtggttgcgtgctcttttgcgagaagaacttcaccatgtcgtcgaagtgagggagttcaccgacgggttttttggtgtcggcatcgacgactgctgcttgtgctttggagatcgtcttaaaagtggcgatttggcggtcaaaaaagcctgtcggcttgccgaacgtttcgagtccgacgcttttagggactacgctgtggaactttgcgagcgtttgtactgcattcttccagctgcatgcttgttagtattgcgcagtcactgggggtttttggtgtcagcgttggagcctccatcgcgacgtacagtgctttcctctcctccccgcttatacctggcatcgctgggtcggtgaaatgccgcccgtctaggaattccatgatgtagaatgcggttccaatcacgctgtcatcttcgcacaggcagtacgccctgggaacaggtacatcggtatcccacaatgcccggataatcttatactcgcgctcaaccttatgagccgtctttgaaagcagcttgccaggaggcttcttgcgcagaacgacctgcctgccatcagcggcagtaagaaggtaggtaggattcgattgaccgaagccgaactatcgtgacaaaatattagttcgtccgtttgatattgctcatttggtgattgacggggccagactcacctgcttcacatcaagtggagtcttgacctctggaacatgttggtcaatgtacttctccaacgaggggatatctataggctggcgcacttctcccgcccttatgtcgatataaaatgnnnnnnnnnnnnnnnnnnnnnnnnnnnnnnnnnnnnnnnnnnnnnnnnnnnnnnnnnnnnnnnnnnnnnnnnnnnnnnnnnnnnnnnnnnnnnnnnnnnnnnnnnnnnnnnnnnnnnnnnnnnnnnnnnnnnnnnnnnnnnnnnnnnnnnnnnnnnnnnnnnnnnnnnnnnnnnnnnnnnnnnnnnnnnnnnnnnnnnnnnnnnnnnnnnnnnnnnnnnnnnnnnnnnnnnnnnnnnnnnnngatatctagaggctggcccccttctcccgccattatgtcgatataaaatgaggaaaggactgtgcgaaaagattgtggagaaagcgtatatatttggcaaggtgactgactgtttaaagagtaatatgtacagccaagccataaatgccggggcacctcctcggcgtgaccgggggacctcggccccagcatttcctcggcgtcaccgctcgaggggggagcggggagaaaaaacaaacagaacaaacactcggcgcgtcccagcggtgagacgcgcagaaaggcgtcgagcgtggagctcaccgcaatttttatcaagctaggggcgctttatcaattgcgttagccaactcactgcgggtccctgttatttttaccacagctctatccactcaattctcgatcttcgatcctctaaccattttgtgtctaccatgaccaaagagaccaccccgccacttcaagagaaatccctcccggcgcacaatccgccttccctgcctacctccccgctaccgaaacgatcaaagcccgacacaatgaccaccgctgctgtcacctcgatccagcagccgctgcccccgctgcttgttaagaagctcgttgagtctgcccaggctccaacacgcggctcggcttttgctgcggggtacgatatctacgctgcaaaggagactgtcatccccgctaagggcaagggcgccgttgacactggtattgctattgctgtacccgagggaacttgtatgtgacacctgtgatggggattgagattgagaaatttggcggagctctcagcttgttgaggctgagttgggttaagagtcatactaatgacgaatacagatggccgcattgctccccgtagcggccttgctgctaagcacttcattgacaccggtgctggtgtcattgatgccgactaccgcggtgaggtcaaggtgcttttgttcaaccactctgacgtcgacttcccagtcaaggcgggtgatcgcgttgcccagctggttctggagcgggtgagttccggctatcaatactgtatgttgtgaatgtgtctgacctgttttagatctacacccctgaagtgagcgttgtcgaggagctggaggagagtgttcgtggtgctggtggctttggtagcactggtatttaagggtcatacctcggtacataattggaaggacagacaaaattagataggttctaggtttgaaaagaacctagttacgattatatgcattttgagatcttgtttgactgaatgaacgaaagatacaaaaaaaagtccatgcttgattcaataatcaaatctatgtccacaccgaatttttgatatagagaggggccatcgacccggcttcatccaatgccctcccgaaatccttctatcatctagccatgccatatgcaaaagatataaaaccaaagactatcgcagctcctcgggaagatccgccttcttccaatcctgcaccttgaaaataatcttcggatcccgcaaaaaccgcgtattccgcacgagtctaacctcagcagccttagtcttgcgcaagtaatctctcttctccaattcctccgccgagacctctccttccagcgcaggcgcaggaaccgccagctccgcatcacgactctccagcgtccgctccaaaacactatgcatactcgacagaaccttgacagtcgcgctggccaacggcaaatccgtagccacgacatcgtcgggcgaaacccacgacttggtcgtgcgtagcccatccactgcagaaacggcctcgcttaggcgcgcgacggtcaacgccgcgaacatgtcgcccgtcccgctgaagaagcagttcagcgctggaatgtcgacacggaatagtcgcggggacccatcggagcgcgtggttgagccaattactgttaggaagttctctggcggggatggggttgagcctgattgggagagcttgaagagctgcactgaggtgactatcacgtgtggaacggagtagatcctgtgaatggctgtcaccgctgaagcgagagtggctaatgaagttattttgatgccggagagagtcctgtattatttttatattagtggttatgtctgggtatgaagtctgggttgcttactcggcttcgaactggttgggcaaaatgagatccgcaaaggggatgattttcttgtatgcggggactacgtcgtcgttgacatatagccggccttggtcgcccatgactggatccaggactgacattatatcagcatctgtacttgggaggaatggagagtctttactgaccccagaaaaatgacccgggcttcttctccgccttcttttgcaggtcaatgccgatagcgcctactgtttccacggctgctgcactcggggcgtagcccgatagcatgacatcgaagtctgtgaggttactctggcataggccctggtagagatctgaaatttcctgcgcggtggcacgagttcccttaaattggcggtagcctgtgtggttacctgcaattgcatgtgagtctgggttgagtgttcactgttaagaccgggttgcaacgtactgaagtggacggtgtttatggcggctacttcgcagcccagagattgcatgacgaaggttgccattgtgtttccaacatggctagagaagatgttagttgcttcactccaaggatgtcttctagatataatgatctgcgttatcggactcgaaacttacccataaactacctgattgagtgtcagttttatcacccgagggactgggcagtttcacttacatggctggcaacagccagaaccctggtctctggtactaatgaatccatgataagtctaagatcaagcagttgaattgaaagagagagtctatcaagtatgttcaatgttgctatgactctgtgtggggttcggggggggaaatgatttgccgaaattcctcttacctaattggccccaagaaccgagtttgttatcagtaaagaaataattccatgttcaattggagttagtgctaattgaatgtagtatactccgtagacatagatgtagaactgtagaatcaatcaagttaaaatctttcaatatttggaatgtgagaaccttacaggatctgatctccttccgtcaatagagaattagaaaagacaaacggtgtctgtcatttaggaagtgtggttcgggtatttaaagatatctcattgagaatagagaaatgttaccctgcactactcagcaggagcataattgaagaaccaaacagtgagaaaatgtagctgctctactgcttacgtaccgatggcaactgcatctcatctcacattgcaccgatgtctccgtatacttctcctaataaaaggccttaggctttccagaaggacgtaggggctctgctgagcgtctttgcggctcaaatagtgagactgtagcagtcgctgggttcgtactaagtatttctagacaacataggcagaatttgaaaaatggtaggccaactgaatagcctcgatttttttcacttagggatttcatttagaggagatcgagaccgttagtatgaatcgtcatgttaacgacgctagtcctttttgataggacgatgggcgatctgaatggttaactaactagttatccggttagttaacgtgtctattgagcgggaagagctgactcaacatctgttacactttcgctagtaaaataccttcatacctacatacatatataagtactatgtaggtactctgtggaccggataaggaatgtcaaacctcgtctatacctgaaaggcggtcagtgaggcagtgcgaagaaacggagatatctaaatccggcccgtctcgacctcgtatacatctcataaccacaaattcgcgccatgcaagccttaaggaaagccttctgatttatacttgcttcgcttcgcttcgcaataatcgtctgaatttctgtctcggcccccttgcacaatttatagttagttatggggccaggattacataaactaattacgaaacacatgagattaattgatcctccggtatgccggtccatatgctccgacatatgacgatcccaggttttcccactgcactagttatattgcaaccactcgcatccctgggcctttcatgaacaattgtctatccaagaagcactcgaccagagcttcctctccaccatcacaattacaggatttaatagcagccctgatgccaccatgtgtagctatcacatgacccggctgcccctcatagctagaaatacagcacattctctttccctcagctactaactacgtaagtataacacctggagtgctttgtgagtgcccactaagcgttaattagcgggacctcgggatccctatgtgatagctctacgaaaatttacttactccgtagagcctgactctgagcttataaaagggcagctaaggtaatagggaagcgccactagggaaataagtgaggtaatagatctactctataactaactgactataacgacacatacatactcaacttttactcaatatagcacagatatgatcccctgaagccaactgagttcaatcgaacggtctaggtcgtgctagtggtactccggagttctgttagcgcattggcaagttctcgtccaatccgaaggccttggaactaaaaaaggcccattttaggcttttctgcaacttccagggttaacggcgacttgcgcttctcaacttcaacttcaccaactcatcttcaagatcgtccagggacttttccctcagtcactccttctgaagaaccgattatcgtcattcattcccgaaacataatgttggattaaacacttctttgtttcccaactgtcattaacatacaaagactgtcctttctcctaataattcatacttgactatttatgtcctcgcctcgatttcaagtcgacgacaatacgtcaaaatgtccggtctttaccatatctacaacctcctaatcctaattactattctctgtctatcacccacatgggcccaatcagtggagcccaccgacctgaccgtgccacgatccgcctggcacgcaagtggagagatcacagaccgtcgatcactacaagaacccgcagaggaaaccacaacagtgcgccgacgaacaatcataacagcatcaaattccacttcgacaggaatgcccaagccgttcgacacactctcctacaacttcgccaacgcaaccacctgcatcgacttcttcgcgaaatggcgtgccaacacgacaatctccaattgcaacgccatctccctcctcatcgagaactcaaatgccttcttccacacccttaattcagcctccgccacctcccgcatcctggaaacctcctgctcggcaaatgtctccaagtgcgcatccatcatgaccgctctcgcggccgatctactcaaacccgccaactgcggtgacgactatgataacgataactccgtcgtcaagggcacgtatcgcgacctcgtcgcatacgaaccaatataccgcaccacctgtcttacaaacccatcgacccagaactactgcttcgtcgacgcagtgtcgaattcaaaaaacccagatgactacaacgtgtaccttatgccgctgggtacccctctcactgtcggggatgtgccaacttgtaataagtgcttgaaaacaactatggatgtcttttcgaaatgggcgagacgggacggccagtctcttgattcgacctatctcccctcggcgaagattatcaatgcacactgtggtgatggctttgcattaactaatatcactgtgggctcggtggatgtcagggctggggcggctcttactgctcccttgcccaatcttggaattgccactctcgtggctttagttcttggtgtcatggcaggcctgttttgatctaaaatatttatgccggtttttcttgtccatatctacacttttttttcttgtttatcttttggggtccgtctgcccgggtgggtatggccatggttgatgtcagcgagcgtgctttttgctttctgatttgaccgtctgatttgtacgtaatttctagtgatattgtccatattgctctcactctgttattttcttattctttccgtatacgatagggttgaatcgatttaacatttgcagttcgctaatgccaaaaatgtccgggtgaataatatattcctcaaacgccagtggcaagcatgtccacaaccacgtataaatagacacaatataaacaaaaaaaaaatcgcatctgacatcattggttcgagtgcacatagttcgtgatgtaagaaaaatctggcaaaggtagccaacaaaacaacaaagcaaaaacgctcactgacataagaatgttattttaaaaaaccaacacgaacctcatcagcttctcctcttcaaccctcctcccatagcaacaccaacaaggctctgcggctcacctccaaagctagcccctagactcataggaaccggcgatccgccaccagaaataggactctgtgtagcggcatctcgttcccgcttgacacgtataaagcccagtttggcgaagcggccaacatgcgtccaaaagtgacgcccggctgggtgtgcggcgatgcgctcgagaagatcggctgtcgcttcgcggacaacctggtccggatggaacagacccatgctgacatagaagagaccggcctggttttccggtgcgatggttaggagctggcagataccagcgtagtccttgacggattgggagagggcgaggtagatggaggcggcttcagagtgggagagttttagagtgcgaagacggtcgtggtggtgatggatgtctgggcgttggattgggcgcgcggggaagtacattgctgcgatatcttggatgtaggagtagtaggagcgagtgttgcgccagccttcgattcgggagacggaggctgagagctcgcgctgcttggcggcttcgtctctccatacatacccgtgcccgcggagagttgttgggtctgaggcgtcggtttgatggcctgtcgggctgtccggagagagttcttcgcctgggccgatgatgtagagatttgaggcgccgtagactgcttcttcgaaggctgcggcgacgcggacgaattttgttatgtaggctcgccattttgcgcggacggcattctcgccgtggcgttggctgatgctgcggaggatatcttctatgaataatgtgtcgcccgttgggtcttgggttgtgtgggatgaactgctaggtagaagggaattctgctgctggaagaatagaagcccttccgttaccggtgcaggttcaacgtgactcgagatcttgatgcgacccgtggggaggtcgcacataacgtcccaccattcaggatggttggcaaaagtagggtttgtgacacctgcaataaaaccaggtaccttgaggagatcgtcgatcttggaaagatcagtataagggaatgcgtgtcgagtatacccacgtagaatgccaccggacgcaagagcgcaggccgccagaaccgcctctgcaacttctcccgatggccggttatgtcctagaaatacgacacgcttctgagtgagaatggcgttgacaagaacaatcacggggtgtgtgaatggcccgctcgttgtcaaatggggatgcgctgggaaagcctgcggggaattggcatgcggcacagcgaacgtttgaatgagcttgatgagggaaaagtctccaacagtctccggccaaatcactgtcggaattttgactgggatgggtatgtcattgtagactactttcgactcgtactcatgtgtatcccgcggtaggacatatcggctcactttcttcggtgacggtggacattccccatcccggagttcttcttcttctcgctggcggatcatttgttcgaatttctccaggaacatatcctttgagttgctagattgcaagatatgacgctcaagaatcgacattttcggcattaacgaaaggtccatggcattaacagcgtcatagagggatgccagagtctcggggaacggagatttgaagtagtcctccagcgctaggagtagtaaaggctgtataatggttagggtcaggcgggtgctagtgccaggagtagcttactttgtaaatgtggaggaacgaatgtcgcgtacagattgccattgccttgactacggcgcctctgttcgctattaatactcgtacattgagacaagacagtacgagtaggtacaacttaccttcggacggtattatcctgctttgtattgacaagattcagcacatacatcaagggtggcccttcaccaccctcatcatcgctgctgtcggggtcatcggagatctcgtccaggttctcgtcctgaatatcggctccctcgtggcttccatgatattgtgatttccgttttttcttcttctttgcacccgacgaatccgtttcttcgtcgccattactgtctttgtgtaagaagaacatggtccagtcttgactccgcacatgcgtctgatccggcagcatcagctctgcaagcatgctttcatccccactgattgcagcgggatactgatgctccatgatcggcccccgatcaatatggaaggatgcaactaggatgtattccacatggcgctccggcgagtcgagtgggtactgcgctttgcagcggcgtggcctgaagcttgaggccgcattccctgtggatgttctccgaaaagaaccgtgcgagctgctgggcgagcgtccgataaaggagaccgcaggcgagagccgaggaacaccacttgtttggcggttattcgaggcggagagggagtcgttcgacggtcgatatggtattgttgttgccatcttctgggggtgttgtggatagaggattactccgggctaagctataaatcgaatagcatacctgggggcacagaaagcaccagatcaacggccaatgataataatagttgaattaattgtctcgaattagctgttcaggggttaagaggggttaagaaaaaggacggtctctccacagtggagagacgataagagcgataagggggggatccataacattcaaaggttgaacatcgaggaagatgatctatcagaatgcaatctgtcttttctttttggaccgtacattgtagatctttctatttatattacagcaaaattgaggcatcatatattgcatttttatggagtatgaagtaaaaaatctgcgaacaaaacaaaacactgtccacttctaggcattttacctgatatagaatagaaaggcaacattgtgctacagaacacttggatgtaccttataggtatacccaaagaacagttaattatatgaattaccttccatttatcttactttctatatttagacccttggaagccaattgatggttgatgtaacgagtacgattccttatagatctaactataaacacttcaaagttacataactatacaacacctagtcagccagatcctgtttctttcttttttccttcaaaatatagaacttatattatactctccttagcaaggtgaaattacaagcattaaagccagacaaggatcgtacaatatacaatagagggtcaaaagtgtgttcatatagatagggcggtgagaaagacggtggcaaaattatgttgttgtgccgggactttgtttacatcgataagcaagccttcgtcataggctgtttacaattcatatttcagctcacacgcgaattttaccatggtaactaaggatcctgagggatgatataactattaaaaactaatcaacaatgacccaggccaacaatcccacattcaaaccatcgccgttatcctttgggtcgccgagggcatccccgttccggcgcccatccactccaaattccccgccttcggccagtcgcacaggaggcaccccggggagctctcccagtcgggcatatacacctatggtatctcctagcaagctcaatcaatcatatacagtggaggatggtgaatcgcgttctccgaagaacgagcggcccattccccagccgaattttgccagagagttctctccttccccaacgaaaggaggaaagtcgccaggcagcttatccccaatccatgggtcaaggacgggtggagttgcaagcccagctggcgacgcggctgggaagctgccagcgcaacaagtgagggagatcagagaagctttccaggttctcgatagggataacgacgggcttgtggacaaagatgatgtgattgatgtgctgacaactttgggtaggagaaaatctacctatattttttggaaattcggacgagggactaatccgagtatctgaacaggccaagactcgtcatcctctacgctctcgcgcttctttccaccaggagcaggcaatactatgaattttccaaccttcttgaataccctttctgggctcatggcatcgatgtcaccttcacaagagcttctcaacgctcttgctgcgtttgatgatgatgacagcgggcaaatcgatgccacggaattacgtgatgctctcctacatacctccccagaagatggagaggaaagattgactgagagacagatcgatgaagtcttcagtgggtttatagggcgcccagcatttattggtcggggagcgaagtcaggcgggatgggtaagaggggtgaggttttccagtatcacgacttcgtgcgcagcatcatgggtggggataatggaaatagtgccaagaatgaaggagatgcacatgtatgaactgctattatgaaatatgggtttcaattgagttggcgttacggggtcgcgtcttataatgttggcagtttgcagattccaagtctgtagaagcaggggtcagactatacaaagcttgtcaagaatgattatgtaccattacttgttcaattaccaatgattttcggtaactaaaagcagtgaattaagtaaatagaagtatacgaagccaacgccttccgcatcggcagaaaaacatccagccaccgcgatcagatacactccacctcgtcaactgcactcatcttaccccgtttcctaggatgtccgctcgtgaacatcaaatgcagacttgaattcagaaaaatggccaaacctcagcccccctgggctcttggcatcccgggccccgacgcacccccatcgccgcgaaccatgcgaaccctccgaaagatccaatctcaccaagtgctgtcaacatctagcgcgctcattgcccagacccaggcgtctcaacaaactggctcccatgaatctcaacctggatcaacagcaactcctggtgctgcgacccgagcgcgcgcacatcgccgagctcgatcaaatagcgacgcggcttctcgtgaagctgcggcaacaccacctgcgactcagagacgacccccgcggaaaacagggtcgggaattggaataaagcgatcgcttctagagagctttttgcgcgatggaccgcagagttcaaatcccaacgagggactgagagagctcaaatacctcgtcctatccagcagagtggatgctgacggagatggcatggtgaggggtacagtctgctttgcaaaattaatgtctaacacttcgcaataatagtcgccgtaccggatctacctctggttggtcctcctcgacattcctcctatgcccaccgatgaataccttgatcttatccaccgcgggcgttctcccgcttacgccaaaattcgcaatgatactttccgcacactagccacagaccctctcttcaaacgccgagtgacggaggcaagcttgattcgactcctcaacgccgtggcatggaaactccacgattccaggccgaaacctcggtctcgaccgacgtcatctcggcgccgtgagatggagcttctagtgaatgcaccccctagtattgcagaagagtctccctttgggggagagttggagaagatcactaatagtactacaagtgattcagccatgtacgtccaaggcatgaatgtcttgtgtgcgccgttcctctatgctgcccgtagcgaggtggaagcattcgctctgttccattacttcgtcacacgtgaatgtccaggctatgtccgtagcgctatggatggagtccacaagggccttcgtttggtcgaccgatgtcttgagattgtggagccgaagcttgcagcatatctgttctccaaggggatgcacgccgaactgtacgcattcccatcagtattgaccctctgcgcttgcacgcctccattgccagaggtgttacatctttgggatttcttattcgcatatggggcacacctgaacattctgtgcattgtcgcccagctaatccgtatgcgagacctaattttggagagtccgaggtaagtcgaaggctgtcctttgaatgtatctgaccatagctgacttgaggatagcccaaacaaaatcctccgctcattccctcccctcaatgcaaaggagatcattgcgttgacggttctccttgtccgtaagatcccagaaaacctttatgcagagatgattagccatgcaaaatagacatggctagacctaattgagagagcccgaggtaaattccagcctgatgaggagctctgaccgaaagaaagattttactacctggggtttgttttcggatcggcgtttttgatatgattgaccgcaacgattgcgtctggtgactggatgggatgagacttacattaacgaacaccaaagataacacgcttgcttgaatgaactaatgattgtaccagtatttgctagtttttgagaatccatttgagatgagacatgattctcccttttagaattcagatgttttactcttatggaccatgcttccctgttcgtttgtcaaaggatgaaaccctacttttcctcagttctcttgagacataacaaacattgtttgccacaagacaagaagagatgattgcgaaagcagcaagacatcttcattaacgcaatctgcatgatttaggcgcctttcatcgtctgcgctataagtactaagtaccctttacttgacccctctttcttcgccccatcattacccagagaaatcaatgtcgtccgttctaataacatctatcgtcctggccgtatgccttgtcctgattctgatatggagcaacaggcgcgaaaccaatttcgcatcgaatgacccagcgatatgccgcagaatcattgccggcgtgttgaaacacaaagaccaaccgaataacctatcaccacaccaagcgaaagcaatttccaacaaacatctcccagtcgccttcggaatcgacaacgccttcacccgaacagagcgtgcgcatgccgacatgttcgtcgagaaagtgaaacggctgatcaatatatcgacggagcagtggtacggcgtatccgagttcgctagagtcactaccagccactggatcgagcatggcttccccgggatgaatcatagctgcggcaacagcggtcacaaaggaaagaatgatgtgaagttcaccaccggccgtaatcggatcaacgtcgccagtctagcacaaatactttcattgaaagttgtgctatggctgatgttcgacaaaaagactcaagacgaaacaggccacgagaatctactgaacctagcggagtccatcaatcgagtttggatatcttccaagctgaaagccacggagaacgatattcccagatacgaagacgacgtgttgcttcaaacgtcgctggtcaatatcttcgggcaacacgatcgcccagaagacaacccattgaatctcatcctgccttcatttgagacgatgtggcgcatcgtcttgcgaggattcctagagaccagattcgcgtctggaaaagaagaacctttgtggcgggagacaatgattgcatttgccatgaatcccacaaaatcccaattcgacgggcccccgtccactcgtcccaagtctgaatctagggttaatcccagcataggcgatacacatgctattcaaagttcaccctgcgcaaaacacatagttcgggaatcgcttcggctgtatgtgcccacgagacacatacatcgagcatatcagtggcaaccgggtatggggacttctcatgaaatcaggtccgctgatatcgaggggtgtcatctgaggtccgatatctggggttctgatgcagagcgatttaacccagatcggtggtcgtttctgacgccggcgcagggagacgcttttatgccttttggatctgcgccctttgaatgtcctgccaagccgactttcgggccaaggatggtcggggtcttggttggttctttgttggcggctttggaggataaggagcatccgaggacttggattttggattgtgaagatgggaaggtgttggagcacgtcacttctgggaagaggttgtgtccgcataggaattcctatacggatttatatctagtgcggtctacggaatagagaatagtgaacagtgaacagagatatctatggaatatctttcgaacacatatccttatgtataagtaaagcaagcggatgtatgggaggtcggagctgggatttatagtcaaaaaaatgtaaacgcctaggaatcacagaataatttacgtcaccaagaaagaccactaccaacagccaataaagcacagcacgaacgaaacttatgtatgttgatatcgaccacacccgcctcgaatattacatagctctatcacgtaggcgcagatattggtgaaatctcaaccgactttttcaacccagacccatctatcaccagaggcttagaaacaccaacagcattggcttctgcggtcatctcatcagcccatgactgacacatatccctattgccaggtaccgaggctgtggtgtctgagccagcaacacctaacattccgtcgacttttacggcccgcgtgagacgagagccacgatcaagcttcaccctgatccgtgacccaaagaaactcaaattgttgaacatggtcacagcgcactgggcttcgtctgctgttcgcatggtaaccaagccgcggagccggccattgaagtcggccgagtccatggtgattattctgcatttctggacagcaccggctgcttgaagaaggattttcagatcggtgcaagtagtagccggattcaagttctcgattatgatggctcgtcggtctgaatagatgaatggagagccaaggtttgtgcctttggcgcgtgattcgcgatggtggtagttctggtggttctgtgattgattgtcgctctggtggtgcatgtgttgtggaggcgacatctgataacctggcatcatgttccaatatggctcgtacattgggccgttcattactggggatggggggaaacactgcatcggtggtgcgtgtgaatctggcatcatagtcatgaatccttggggtggcattggtatgggtaccatcatgacgccatactctgagtatgagtatggtggagtggcggggtgcgaggatctggggaggaagattagctttcatattttatacttgaggatatagactcactctggcgagacgggtgaagggggcattgccatgtttccatgtactgatggaggtgtggagtggccagagatatagcccgtggacatcattgctggacttctggtaggcccggcaatgggcttggtgggcgtactggtccgcgaaagtgtgacgaccaggctctgaccctcccatccgctggtcgaaagtcgatctgtgttgttgttagggcggatcattggggattgcgggatagacacgtacggtacgttcgccaggcctcgtcttcattcttgacgatgatctggccgagtccggtggggaatccatggctatcatcgtatactactgcctggcgaatatgcaatgcagtttggcggacgagatctttgagttcttgccagcggcaatgaggtggaatctggaattcttgtcagtacttgaacgcatttgacatagatatcaaactcacgccttgaaggaatacgacaaactcatcatccgacctgcgcgatctgggatggtatttatcacgaccgagaagaggcatggctgcagatactccgagacaacacaccccggtatttcagtgccgaaagcgtactagctcagacgtacggattgaaatggcggatagaattcggtccgtcggtgttgcgaaatagtcgaggctcgacttgtccgaccaggtgtttggttgagtatagaacttggacaattgggctttctgtcagagggctatgttagcttagggtatataaatatgatacccgggacgactacaggaacgacatcacaaagcatcaaggtgtaaccagggtgcaatacctgggaacaaatggcacacacctgccttttttttttctcttcctgtcggataaatgcaagtcaacgtattggtctgaccgacaactgcagggaaaagagataaacccctccacgagctggacgaaggtcgagcagattataaagccctggaacaaaaaggaagagaagtcgatgtttcacaagaacagttaggatgatatatgatagattcaattaaattcttactagtattaatctacgatagtctcatgagcttacaagtagaaatcacgggggacccagaatactgcacaatctggacgaatggcgacaccagtcgatcagcagtagccagtcatatcagagaacaagcagttccctttctctttccaactgagatctgtcattttcaccatgagttcagctctgccaaatattagaatacaatagagtggctctgccgtcccacctcccgggtatagtcccacttagtcaaggcctatcaggggccctaacatgtaatatgccccctctttctttgctatccatatttaaataatcatctcgatcacgtaccggggtatatccacagaggcaaatcactccgtaagctgtgcttacttgacttagggaggatgtagtgttacaccgctagatccggatcggacatgcggagtggccatgctagtggacatgcatagtggacctgtattcatcacattggcttctgtgtctaatgtcagatcggaaaccctggaaaaaaagcaaaaacagcaaaggatgggcaggaatgaaagaaaaaagaaatggttttatgaaagggagatcagtcatatcttgcagatattggtttttctttttttggatcaattacattgactattgatttataggcgtagctcgctaagtacctgcagataaaatatagatggaattattgaaggataactccggctcaaattattgccctaaattctcatgtggacagacaccgccgcaagtcgtcgtcgggtattgaatatgtactcgtccttaggatatggagaaccaagtgtcttacagatcttcagatagatctctgtgttccctttgaccaaggccgataactacaatagacatgccgcaggacatgtgcgactgttaaaagtatatcaagacaaatgaccatccgcacagctacggacatcctaagtatttgtactatgacgatacgccaccaaggcactgggctccaggggagatcacatggccatggtctctacacatatctacggcctcttttattgatggattgtggcagagaatcttctttggattatgttcagttcttatgttaattaaattatccttccacgggcgggtgattccctgctaaatgcagatgattacactctattacggacatgattagcctgcaaatggtactatttatataacaagcctatgtataggcaagggatcgtgtttagttatgtttcaattcaaatagaaggataaagtaaattaatctaattcgatgttggaaaatgtgatatcagacagtgtcgctcgaaacagataatgagatagggacccagtgggcgatcgctgaagggcaaaataaaccaagacatgagaccggctccatgccgtacaataacctgctgcaatatgcataaaaagggaaaatgtaaacagcattgccgtttataaaagttggtgaacctgcaagagaacgcatgcctgacaaatcaaagcacaagaatccacatgcaaatagtatgttgtggtcaatgccgaccgagtggaatgaaccaaattcgatgatatcccaagcgcacctcggtccaaagccccgtggttcttgcgccgataatccctgatccacaggctgccatttccggtgtccaacctgtacaatcctccataggcctcataattcgtaaatcgtgatcaacgaagatcaggtagtgccagcacagcccgggcgaggtcggaaacgaaggaaagcatcgaagaaacgggatagaacgttatttcattcggaaaggaagtcgcatctgtcctcgcgacgggggagggattttggtttgcaagtcggcttttgatgttgatccaatcatcgcttgactccccggatcgtccggtttatttggtcctcgtttgggtttattgtgggtgtgtatatcgtgctcatctcatcctccgaagccgaccttggctgcgcagcggctgcagtagtaagagttcatgccgaactgaacaacgctgcggcctgattggcctaggctgagagattgttggcagcgagaacatcggacaatgtcgagagtctggggagaagtggcctccgatgggcgagcaacgccggcggtctgaggttgaggagtaatttgcactggagagctcattttgaggagattttgaactcgagtgaggatttgaaagagagaagggcgctggaaattgttttgcgttgacgcagttaagaggttgagccccgtgatttcttggtttacttcggttttctttaagtgatgatgatttgacttggtaaacaggaaaggtgtagaaatatgaaacagggaaagatcacaggcttttaaattgttttcaagccacgaaagactccgtattcccccttctcttgccgatcatacatgtgggctgacatatgggctgcttttaggctcttgttccaataactcggcgctgacgaggccattattccgataactctgttacctacgcccatcggccatggcgataacacacatctccggcataatacgatccttgatcactggcctattggaaaactaaaaagttgaaacaacgtcgtgggaggcactatatttgatacaaaattgatcatctccactttcatccaaaacagaactaaatcagaaggaatatttttagagtcatgtacatttacgtaggtgggcgtctcaatatctcgacttgcaatataaatacaatctaccgacttggacgtatttctattatttcttttaagttctgaagatcctgaggtcattgtcattgtcattggggctaatacccttggaatactgcagctaagccagtttaggccatgaagccagagagaaagtcgaataaggtgtggcaaaccgaagggaaacggatctccaaatgaattcattggacgattcattggccaattcgttgggaaccttggaattggaacatcccactttggccgaagtccatggatttccacgaatagcacccgtggcgcatcagattcgcgagcgacgtcatattacctggattcggcaacctctcctcttctctccacctaacgtgctacgttgcagattgtcgagtcttcaattccccccccatcttcgagcctaggccaacgccaaaaaccgtttagattcggcccttgccccgcaaaaaaccgaaatatttcctgcccctcattcttgtcccacccacgtatcaccatggccaccggacaccccaaccttcacagctttcccaacagcgatgagctagctgcgcaattgcgaggctatgtcctccgctgccagaactccgctttttcccgacatggcactttccgcctcgccgtctccggtggctccctgcctgccattctagctaaagctctcctcgccccgagcaatggctccccggaagatactccccaattctccaaatggcatatcttcttcgccgacgagcgcgctgtaccgctcgatgatgaggaaagcaactatcgcctgctgaaagacgagctcgtctccaagatccccgccaagttcggctcacctgtcgtccacgccatcgacgaaaagcacattggggatgacgatccccaggaactcgcagatctctaccaagaagacctgatgcgcgagtttgcctccaaggaaactgtcaaattgcccgccttcgatctcatccttctgggctgcggtcccgatggccacacctgctcgctcttccctggccacgccttgctccgcgagaaggatgcttgggttgctgctgagacagactcccccaagcccccgcctaagcgcatcaccctcactctgcctgttgttacccacgctctcaatattgcctttgtcgcgacgggtgcgggcaagaagggaatcctgaagaagatctttgatcttgaggagggctctagtctgccttccactctggtcaaccagggcgctggtgaaaaggtgacctggttcacggatcacccggcagtggatggtgtttcattccctcgtcgtgggagtctttaaggtgtgagatgtcctagatggatttgagaggtatggatatggtggtggcttctttcctatttcgtaactctggatatgccttgcatggcattgaatccgctggctgtgatgaaaagtgattgctaggattaatagaccaaactcatatcttaatctgtcatttttgtccatacattataccgcacagtagcgatttcttctagaagtatgtccaacatcggaaggtcctattgtttgtctgcttatcctttcaggtctttctagctggaatactgcaaacaaacggcctcaataagtccggagacaacaaatataaccaactgacagttttgtaagacattgttggcattttagggcgagggagatattagaaccggtagcggagttcaacccactttcaaggagcagatagctaagtccatgatctttctcccctttggttcgatgaccagatgtaacagagatattatctcgtaacaagatagaaggttacatttatttttgaattgctcacaattcgcaatgagagatatatcacgccggtgctattcctaaacctgacactgctatttagaaggcaactatacaggaaactagatatatggtcattttaccaaatactcgtacgctattcagccaaagagtggtgtcgagaattcttgattagaagatcctttattgattgatgtaagatatttgcagatcaatcaaatgtggtcatatggagctgaaccccttgcattatgctgattctccaaccgcaagcatacccgaaaattcgttgagatttgccaaattcaggctctgtacagcgtatcacctcaaatgaaacgggttgcctaagaaggcctatctagaaaggggccaaaaatgttcttgttgtccatgctatttgctagcatattgccttacctttgaataagcccctaaagcagatacgagacaattcattgagagatacatacccaatctagtaacgtatcttaatgtcttattctgccatagatacggaggacaatgtactttgacagtgagtgcccaagccacgcagcccgtgccgatctcccgtttctagccggccccccacaaatgcatgtaaccccggatttccttacgggatatagagtacagcttagtctatggcctctttaacggtttgggcagttattagcctaaactagttggtatgataaatgcgttttggatatggagcatctagaccataggtgtgacgcctatcacttgaccgctaggtacaacaaacagctaaatgccggtcaagtaacccacaaacatgaaacgacccaactaataatagtcccctactctcatatatgcccacagagaaagctcaattggtcaatacgtaatcggccgagactcgtggacccctggggctgtcttggctgtcgatgctgcattgccctcttttctctgtgacattgtgctggccggccctagctgtttttgcatttctccaaacaaccctggtcactctgttacaattaagaggtattagcgagaaatcaaagttatacgagggagaagaactcactccaccatcaatcttgcagagtgtgaagcagttgttggaccgggaagaaagtgccactcctttgccggcttcgataggtgaggcaagggctagaccaaggacagtcgcaaaggcccaaataaagaaacgcatattgaaggtgttggcgggataggttgttggatttgtggtgggaacttttgaggatttgataaagtgatcattgtttctcaaggtacactggagcctcccttttatattatcctttctattgtatactacgtgatattagatactcaattcatcccccttgactgctgtggggttccgctcccacgactcgtgcgggcttatgtgcatgatctccaacatgcagggaggatcctcgaatgctcactcatattccaaaatgccaagatcgatctacatggagattgtgctgtttgagtaaagacctacaacttccttttcagctcgatggctatacggtgtcggctgatccaattcctgcaatgtaacctcaaattgcgaaccagcaaggcatggttctggtacattaggcgtccaactataaagatctgcagcctatcgcagctattaggaaaatagtcaagataacatcggtcccatataaagcccgatgcccacgcgagttatgaaactaattcgtcagaagtgcacccatattcactacaaacctcacaaagaacctcaaaaaatctttacaaatcaatccctcaaacatgaagctgtttattgtactttttgcacttgctgcctacgcaatggccgaggccggtccgaacctggaggcgagagctgggtgctcccagaagggacaatattgcaacgacggcacattcctgtgctgcccgggacaagggagctgtagtggaggtgtagtaagtttgcagcagctctctctctagagacagatatggtcaaacatgatatcagatggctaaaatgagtcatagtgcaaatgagcaacgatatacctaccaagggagcgcagaggtagctttatggttacgggatccatatatcgagattgttaggactgtctctttggtcaaagttcggggtactccaggcagtgtgttcctatgttgccgattctaaacggccgtggataaagctttccatccgcaataaaagccaataatccaatgaggatttattgcaccttgctccaagtccctgcttcataaagtcagcccgagttcgcaacttaattagtaagatggctcatacccctctagctcgatattagtggagcgtagatccccgtggacaataaatagtcagccggcctctgtccttgacattatagccttcgattgcaaatgttttcccagccgttaatacgtacaacccattgtttagcactcatgataatatctcacacatgctcacgcatagcaacccattcgctaacatcatgagcagctatgcccttaacctaccttatattagctataacatctgttcgctcgagggccatcatgtcagatgttgctccacagacttcatttgacactatatcttgtgttaaggtagagaagaacactatcattgccggaacccaggactggtatcatttgtgtgtgagatctcaccaagaacaacaacaaccatgcctcattgatccttaacggacacacaggtgcggtgttgtgcctcaagttgcacggcaactaccttgtctctggtggtcatgatggggtggctcgtgtctggaagatcgaaaccggccaatgcaaggatgtactccgaagccacgagagaatgcgcatgcaattgtcactgctagcacatataggacccacagcgcaaaatcagagatcagggggtggctgcgaaacattgaagaatttgcaggtattttaggaactacgatagtcaatgcaagttcaagtacattgactccgaattgctggaccacctccatatggtgcgagatgacttggtggatatgttgcgaagtggaatgggttgtgctcgacggcaaagacggcaatggcgtcattgctctggctaccatgcctacctgaccatctcgcacatgcaatctcgcattcgacagtaattgatatttctcccatctcacataactgccgttaggtgccctctatttcaatatataacgatgtgattaggaagtgacgggaaagtgactgctagctgaacgtcgacaaaggtagcctaaaagaggtatactcgtcgggcatagagatgtgggttttattcttttcaacatatccaaacaaaatccgagatcactgtattttctttttttttttttcaaacacttccccatgtgttgtgactgccggaggatatgttataatctcatctggtgacaagctgatatgcactggtggagtgtaggttaagaataaaagagtgggttaccatagggaagatcgcacacatcacctccccaactctccgttcacaacaaaacactcatttcatgaacccaatgcattatgccgattctcatttaatgacctaatacgaccatgcctatcccaacacgttcattttcgctgcgtgatccccgtaaacaagtcagtcccccggttgtttatcccttgaagctccccacaactgtcgcatccctcactgtgccactattgccatgccaacaactacagaaagaaaccatgctaattactaaagacttcaagtatagcacgacctgccacaaaaacccccactccactacccggcaccgctagcccgagcaaggactctgctcgagagacgaatagcaagaaccgctcgccatcaaatccctcgccggtcgagggtgttgctttgaaagacaatggacccactgctcgaggaaaaaccctacttcctcagcgcagtaatcttgccctagacaatggtcgtggcacgggacatgggcgcattcagccacctagcatcaagccgaaaccacgcgggcacccgtcaccaattagacagccagagatatcgccagctaggaaacaaacacaggcagattccacagcaataaagattggggtagcgcccagccgtcgtcaaagcatcatgcgacctggtgccttgaaggtgcctttagcgaagatcacggtcgcttcgtcaaagagctcggcacaatcattcgcgccgccctcaccccgcaaagctccaggaaggccattaccagttcagcctcatacgatcagaagcccctcttcacccaagaaaacagagacgctacctccaccacgtcccacacggtccctctctttacggcaacctgtcagcgctagcaagggaccacccacagctgccaaaacacatgtccggcacaagagtcagctggcacagaatacaaaacaagccgaaacaaccccggtaatcggccaacgtgcacgagcacactcaacataccaacggccgtcgtccccaaaaaaatcgtccaaacctccaacgcctacccctggagccgaacctcagtctggaaatgtacttatcccttcgtcgtggccggatatcgcagcactacaaacagaacttcttcagctcagtcttttccattccaactcactacaaagccaagctgaatggaagtctgattccgagtcacgtctgcgcaaaaagtatgacagtgtcgctagccaatatcgattggtactagcaaatgaaacgcaacagcagtgtcacctgaatgcacaggccctacggctttggctttccaattgtcgcgaacatcgcggtccgcatgatttctccgagcaaatccaaattctatcacgggttctacaggatgtctcggacatgattgctggcagtcgaggtgcacagtactctcgggctgtaaaaaccttcgaagactggctcaaccaagcggagcttattcgtcataaacgtgggtcggggtgccttgatgtcggcgcctttattgatcccctggggcggagctggaaagaatcattgcatgctttaaatgtgaagttggaactctgcgtacgccaattacaagtacttgatatcccgggcttgggggaattggagcgtctagaacagtctgctcttgccagagtggccaggaatctggttgaattgatacagctgatgatgcaggagattcgtgccatgcaaacattggagacagaagtggtgcgttcagaaagagattatgtcggccttcttgcgacgcagctggtatgctctatgaaggaaacgagggctccccaagtcggcgcatggaggagctagtctgtggtttatgcatctttgcataaacatgtagttttttaccacctgtacaaacgtgcgcatattacgtcgaaatgaaaaggaatgacattacacgaagagtgacagtatttcgcccaaagtaccttgcgcccaatcatatgtagcttgcacacggtatctaggtaactagtacataatggagatgggaccctgcaacggggacagcaccgggacctacagccctacctgcgaaacaggcgtgagagagaagtcgtcaatagtggtattagtgtactagggaggagaacaccatggggtgactactaagaagagaaggtggttgatgtctgcgttgctatctctgcctcggggggcttttttagttatcacgtggcagcttagtcactctatactggagcccaacaaggtaaaccgatgagtcagccaccgtcatctccaccagggctctagatcttagagttatcgctcgtattcccctcatacttttatttctatctttctcactccatcgtcacttgtctctttctacaccgtacagatatctactggaatgatatgcttcatgcagggtgatgtaaccttgggaaagttatctctcagctctcttcttgacgtcatccacggcagcttccgttttgacagataaaagtcacccgcaaagagacggtatccacttgcttagtacctttcgagatgatcgccgatcgtacctagtgaagaacttcaactttctcccccatctaatccagtgatcatgaaagactcgctttacgatcgcctttggcgccgggaatgcggggaacagctgcggtatgctgggcttcggggaatttacggatctaaggaatggatcaatgatctcgacattgtgaacgaactcggtgggcatactggttgtgtcaatgccctcaggtatgtttatagcttctgcctaggcctaggtactcggtttcatcgactggccaacacctccgccatttctgatgcttgccatgctaacagtctcgcagttggtcaaagtcagggcgtcttttggcgtcgggctctgatgatagacacctcaatatctactcctaccaacccgactcgtccgatgccccattcgcgctcaacaccaccgttgccaccggtcataaagcaaatatcttctctgtcaagtttatgccacactcaaatgatgggactctggttacatgtgccggcgactcgcaggttcgcgtcttcgatatcgaatattcaagtgggagtagaaatgatgctaccacctccgcatttgcggcctccactcagagccgaagcttcgatgagttcttcagtggcacgcggtacctgagtgacggcaataccaacgccagattgtatcgaagccacgccgatagcgttaagcgcatcgttaccgaatcctccccattcctcttcctcacttgctctgaggatggtgacgtccgccagtgggatctgaggctaccatctagtgcataccctccgccacgcggtggccaaggcttcatggcataccgacaagggttggaacatgatggctcgaatgttccaccgcctctcatatcttacagaccatacggtttggacctcaataccatctcctgctcgccaagtcagccgcattatattgccttgggtggtgcgcacctctactgctttttgcatgacagacgaatgcttggccagaagacctctgctagtgctgccagcctcaataatgacgaagagatgagcaaggcgacgcgatgcgtgcgaagattcgcaccgggtggcaagcacaatttgaaatttgatgatggacatatcactgcttgtaaaatcagtgatgcgaaccccaatgagatggttgttagctggtctggggatcacatttacagttttgatttaatccgcagcccagatgcccgagaggtacaggcgggcgataaatcgactctcaagggcaaggatcgacaggctcgccgcagttcacggagccggaagcgcaagaagcccacaacaccttcatcgcaagaaagtgatggccgacatcagtcccaccgtcggtcagcagagccagataattttaggatccaatatgagaatggcgaatcagaggatgtcccatttcccacattatcagatagtgtcatagacaccgaccccgagaatttgctcgagcaggctcggtattctgtgctgaatgatgcccagcgattgagcatgcagattgcaaaggggttagtagaacttcgaaaggctctgttctcagaaacgacagtccgggacgcggcagggtccgacgaggtgggacccgaatcgtactcgagatatttttcatccgcactggaaattgcgtctacgtttcttccacaaatgggcaatgtcatgcgcgactggcgctatcccgtgaacccatcacaggagacagttaatttccagcaatcgcttcgtcgcaatcgccaatcgtcatggagatttgtccaggctgctggcacacttgctcatgcattggcagatcaaacgcaagttctggaagaatcaagtttccaaatgatcaggcctgcaccaggcgaagatggccctattgagctggcagctcagtttggctatgaattcctccgggcaattcttctttggctgcagggtggcaggcggcgtcttctagagggctttcaacaccacaatgcccctcgacgattacattgccgatttcctatcccagatgagtcaggagaggatgccatcgaaaccattctagtaccctacattatggaattggcccgtgacactccgattgtgaatgttgacgcctccagattcgagcatgacagtacgcgcattctgttccaaacccaacgggctgccgtgactgcatttgggaatgctattagattgcccttggaagatcttgggggctcggctgctcggttcgacagaagccgtgcttctaatcctgcctcacaaatccgctctctcgaccgggcctctgcgaagaggttctggattttacgagtgggccgaggaatcttgatgggggcaggcagtgaagtaaattacagatttgtcaacaatgctttcggcggacttcacaccacaacgaacgagtctaatgatttgaatgaagaaagggacccagtttataccgatcgcaatgcggaggaagaacgaatccaacacattgaactcatcggggctaggcaaaataaccctcggcctgaaatctctcgaggcggtgcaacttcttcggacaatagcgacgtcaatacagacgagaatgatagcgatgacagccatgcagaagattcaaccgacgatgaagaccatgatggctggcccatgcatttatcttcagatgaagatagtgagggatttgattccgatgacaatatgccccagagatatgccattagaaaggcacgacatgagaatgtcgagcgccatgctccatgtgtgcctcacatgagaagctatcgcggtcactgtaacgtcaagaccgtcaaggatgtcaattatttcggactagatgatgagtacgtggtcagcggctgtgattctggccatatatttatctgggaccgcaagacgtcaaatctagtcaacatcctagaaggcgatagtgaggttgtcaatgttgttcaaggtaatttccttcactagttaaaaagacaaagattaacattgtgatttaggccatccctatgaaccaatgatcgccgcttcaggaatcgatagcactatcaaaatcttttcaccagaccggaacgctcaagatgatgcccgtaatggtgtgaacatcctcgaccctgacaatccatcaaacgcgtttggacaaaacaactctagtatcggcggtctcgtgagccggaagcgagttcatgaaagctaccgtatcatgagccaaaacgatgttgaacgtcgtggtggtatgagtgaggcacacatcactgtaaattacttgccctcgatctctatataaatatttttgctgactattacctgaagcggagcatgctcgagcgcctggctgttaacctgaggggccgacatggcggccttggaattgatgatattgctgcttccggtgaccatcggaccgttgtcatcgacgataattgctcggtatgtcaggatttcttccttatacgtgggaatgatactaatcattcgataggtgatgtgatagatgaacaggcagagctctggatatctgcatttgcacagtgtcaaaaagatcatcagtctcataacctcatacatttattgtcatagcatcgcattacagtctctaatgcaagaaggcactcttttacttctttcattcctttcttcaaggctgcacctgccctttctatatttaggtaccttccttccttataaagccaagcaaggcctagaatacctactatcaccccaacaactacgagagccctatattcaagcaacactacacacatctggaaaagaagtagggcgccttgagctagctcttcttacaacatgttatacccgctgatcttacggcatatggtagcgatatgtgtacccctgtatgtgtaaattgcagacactggcggtattgtcagtcaaatccatactcggaaatgaccgaagtcttttttttggtttcgtcgattattttctatcgagcttattatgaagtgtactcgtgttaatatcaatgtgagtttaaatgatgatcccaagtcacaaatggatcaagtatcagttcaattagaaatttatgcccaggaaatgaggtttccttctgataattggcatgtcttcgttcttcgtctcgtcaatctagaatattagatggtacagtagagacagtggtgcggatatattgactagtggtgatattgctggcaacaatatattgggcgggtgtgtaatataatcagcaaactagatattcctatagatgcagatatggatttctgtagccgatattcgatattcgatataccttcacgtgaccgtccttatcgtagaaattttttgcgataaaaaaggaattgcccgcgcgaatatctagaggggcagatcacaaacttcatttataaaagtcaaaagtcatttgatattgtgtcggtgctttaggctcagctgctgtagtctaggtcccgctatttcccgaccactctacatctcctaacccgatatcacagctaagtatcgattctatactgcggttttggctgtcgaaaaccaaggagtgtgtaaaatttgttacatcttggaacacatcacatcatgtctgcatcagaattgctccaagctcgcaacgagacaaccactaggctctatgcagaccctcacaacccccacctccaccttgaacgaggcattcagtatgaaaagttgggcttccccgacctcgcctctgcagattcatatcgtgcgctagcactgctggagtcggtggttgacccagatgagtgcgagttccatgccaggcggaagatagacccttcccagcaggctcccaaaacggtggcgaatgaatcagatgacgaagacgaagacaacagcactgtgcctatcacccaagaggaatatgatgccatcattgaccaggtctatgtccttctagtacgcagtctcgtccgctgcggctgctaccgcgatgcattcgagttcggcgtgcgcgggttggccctcctcgagaagaggtctgcaacagcctcggtagctgctttgaacgtgcagatggatcgtgtgaaggaaatatacaaatctcgcaatggctctgaaacagaaaacatcgatctagactcaatcgatcccagcgtcctccctgcacagggcttcgcccgccgtgtcctctatccctggaatgggcacgagcctgaccgccgttcaccagagactctcaaaatactcaacgagcgattggcggtcattgcgccgaaatgtgaggtccgcgcagtggccttgccagtgctgcatgcctcggcagatgacgactcgtccggcatggacgtctccgtgcagctcggcctcttcgcgaaagaagatatcgccccagacgaaatcatcctccgcgagtcttcactgctcacagcaaccaaccgtctccacgacgatctctgcgatgcatgcaacgcaccgctcccagaactgtccgcggccgagccccccgtcgcctgcgagggtggctgtgtagatatcatcttctgcagccaggcatgccacgacacagcgcaggaggtttaccacggggcaatctgcggcctcgaggatggcctcgactctatcggcaaggatgtccccgaccctaaggataaggctgattacctgtaccttcttctgcttggcagagccctcgccatgtccgccacacaggacaagcacccgctcgacctgcccgagatgaaatatatttggggcgatttccatgatctcgatattgagtctgtctccgcggaaacagagataacaccaaccactgacgataccgccaccctccccttctccttccagctgaatgtcctgcagccggggcgtttcctcgacgaaatgggcctagatccatacgtcgcgctctaccgctacgatacctgggttctaaacacgctctttgctaagttccgcggcacggcatcaggccgactttcgacttgggatggaggcccggagctgtgcgctgttcatccactgtggtgccttgcgaaccattcctgcgatcctaatgtgacctgggaatggagtagcgaaatcaatttccgcgtgcggagagacgatgagacggctgtttggtcgcgtgggcttgagatgaaagagctaaggcctggcggtattgcgaaggattcggagatcctgaatcattattgcgatattagcttgcccgttcagaagagaagggaatgggcttctggggctttgggtgggacttgtttgtgtgataggtgtgtttgggaggctggggaggtggagtaggtttgtatttatgggttggtgtggattgccttgatagatcacgatgagatacccgtttaactgcattcaacgagaagatttccaatcaatgcctcctatagatcaaacacttattactggagtcatacaaggtgctctatttgaacatgtttatttgaacattgaggaaatgcaaccctcaccatgaagaataacacgtttttagtcttcaataacatacttcaggagcgcagtgacttcgcgctccagttttaaccaaacttcttatatttgtatatgtaggcgaacataaacatagtaaaaaataggaaaaattcattcaatgtatatcagtatgtttagtaaatatctattagtttgtcttcgatctaaaatatggtactgagatttagacttgatcaatctacgatctagaatattccttagacttgcgtgtgcgtgtgaatttcccgggcattaactatcgcctagtctcctttctgttttatacgtattcgtttttttgcacttatctgttctataagatatttattttgtaggtatcataaccgaagagatgtatgttaatggatatgatcattgtgctttgtttttcattcttctttttgtccctgcagctagttgagatggatgctcatataggtatgtatacttctccttcaggaatcccagagccactaagaggactatctagaaagaaaagtaccatatttgaggcctcatatatgttagttactagtgctaagattctaggcaaaactagtcaggaccagcaatgatattagtcagcggtcgctgacgacaacagtcacagcagtcacccgatgtgagtggactcgatcatttctaagacccatttcctctgagagattattggcattgtgtggaagagaacacgcgtatgacagcctccatctactccgtactcacccctccttttgatcgacacagccgtggatccacttcagatgagtgaccttcagaaatcatttgccaagtcaaaattggccaaatttccccccgaagcaccaatgcctgagtcaatgagccactcagaggatgcatgggaggatggctcttcggcttcctcgctgtcgtcgaccgggacgatggtcccgtcacctacgcgacagctattcgcccgaacgggacgacggttggtttacttctccaatttccataagctcaatttaggctcaattgcctatttgcatcatccaattgtctgggactaggctaatatacgaaaacagacaatcatctcaaacctctttgacatggacagacttctttgaccaggaactatttcttccggaggatgttgataatctccatattttacaccatgtctatttaacaccaccgactggatcaggcccgctttttgtcatgcaccatggggccggttcatctggactttccttcgcgacgtgcgcagaagagatccggaagatcctcccaaaggcggggatcttgtccctagatgctcgaagccatggccgcactgtcgttaccacattggacagtgagatagatgatggagctccttctacggcggctgcagcccaggttgaggcctcgggaaacgttgagctcgacctcagtcttgagaccctgagccgggatctagtccatgtgatctaccagacacaagctaggatgggttgggagaacctccctgatatagttctagttggacacagtctaggcggtgcggtgattacagatgtcgcgaagagaggagagctgggtcagaagctattggcatacgcggtgttcgacgtagttgaaggtactctcgtcttgttggtttatgtctatctgatactgacatccccatttgacaggatctgcaatggatgctctccagagcatggagaaatatctttcgactcgtccgacccgattcccatccctgctatctggaattgaatggcagtacgtgtccatctcgactgtcatttctttacattatcgctaacattacaagtactcgctctcgcacaatccggaacaccacttccgctcgcgcctcggttccctccctcttatacgaagaaagcgagcctagcgacccgtcccgcccttgggtttggcgcactaacctctccgcaacgaaacctttttgggaaaactggtttgttggcttgagcagaaagtttctcgatgcaagaggtggcaagctattactacttgctgggaccgacagattggataaagagttgatgatcggacagatgcaaggtatgggtttcgaaagtccctgtcagccatgtataataattcggtaccatgctcactacaataccataggcaaataccaactccaggtcttccccgaagcaggccacttcgtccatgaggatcagcctgcaaagactgcgcagatcttagcggatttttaccgacgaaacgaccggagtgcattggtgcttccgcccaaggtggcggatatgcaggcatcagcggcgatgaagaagggaactggtgctcctggtggctcaacagcgcaccagaggtagtatttcatgatttgtcccaatgcttgaaatgagatatgatatccaatgagaggctattcatagatgtaaaacacatgctttcgagcagtacatctataacgctctttctctaatgctatcacgtctactccgtacggttgatgaggttaagctactcgcatgtagggaaataaattagaaaaagtttcattctcgaacggggtgaaaagatcatttaggacaactagcaggctagcctccagttcggagctctatgccaccccattgcgacaaacgttaaagtgaaaaaaggaaaaacaaaagctgccgggcacagaaaaaaggttcttgcctctcgctcgataaacagagagaatcaggttttcgagattccgaacgccaccgggatcccatcacaagtaatcatcatgcgaggatcgtgaaaagggatgtgataaaacaaggagaagtaagggtatcctgagagagaaaaaaaaaagagagcgcatgacgccaagaaaaacggacctagatgccattttaaggcaaataggcaccaccagcaaccaccagattcatattggtgaacttgaccctatagacaggagacttcttagtcgggaacgcgctgatttggtcggcggtgacaacaacatcttttcccttctttttcttggtctggcttgtcgaggggtttgcggctgcatccagtctggttccagtgcctgattcattgaggatacggccaccctgagtggtttcctgggaaccagcaacatcccagactcgcacggttccatcggctccaccggagaccaacactgtggactccacactccagctgacagaccagattccacccttaccgtggccacgcatgcgcttcagcagtctaccaggagctagatcccacaagatgatgcagccctggtcgtcggcggatgccagaagctttccatcgcggctgcactccatcgcggtgatactaccagtgtggccagtaaacatgcggacagcattaccagtcgagacagcccacatacggacagtgtgatcagagctggcggtgaaaatgtatgccgagttggggtggaagcagacgacatccacgtcctggtcatgaccgacaaaaatacgctgctggcggatttggtcactcacccacaaacgggcggtcctatcagatccaccggagacaaagtagtgaccgaagggcccccagcttaggtcccagacagggcggtcgtggcctttgtagacaaccatacattgccagctatcaagggaccaaaggcgaactgttttgtccatggatgatgaaagcaaccagcgtgcattggttggaaccttgtcatcctccgaaatgccctcgcgagcagtggcgcagggctgaaatgcaacagcagtgacgggaccggaatgaccgataagacggcgcgaactggcaggtggtgagttatcaaactcagggtcagcagcttgaatgttcgtgccatcgaggctccaaatccggatatacgactgctggaatccgacggcaacaatctggctgtcatctgaaaagtccatgcaagtgacgctgtatatttgttagtaaagctctgtattacgaagattgtccagatgaacatacccatcataagtgttgtggaatgtgaacatgcacacactaagtccaggaccgacaccacctgtgcgagccttgatctcgaaccgatcacggtgttccatgactttcttcacctcaatttgaacgtcacgagcagtggacggagggaaaggaatatctgcacgactaggtgcttcgtcgtcatcttcattcttaatcatttggtcgaactcttgaatgagcgtgttacggccagcgagaggaggttgtttcgcatcttcctcggctaattcagcccgcacatcctcctctagaagctgttccatagggagtcttccgagtttcaggcgaggaagtgtgccggccatggccgggttgtcaccggtgtaagccgagccggggtggtgtcccggaatgccttcatcctcagccgggaaggtctggtctgcaccgatctggttcaacatggcagcgaaactgaatcggtcatctgctgctcggtccaaagtcttcaccgagcaaaagctgctgagaattgcgttcatgacagaacccccctccttgtccttgctctccaggaactggagaagattggtgtaagcagggttgcttaacacaacgcggtatttgttgtttcgataaagcttagcaacggagttatcttgcaggtgctccggtaagctgataggctcgaagtggcggacgtcatcggtatgctcgggaaggaacatgttcttgttggtttcgaagaatgacttcgcatcctgaggatagaaggaagtgaccatattgaaaaaggaatagacgaacagcggccatagaacacgccgaagttcaggctacaagacaattagcattggcttatcaagtcactccttgtctgtcgcaccttgtacagatcaagattttcctcaacccaattcttcagtaaatctagtgatgcattagttgctatgttgggtcacctgaatggaatatctagctcaccaaacccttgtcgagtcttgggacgagaatcttcccccagctgagggagcggacgcccatcaatctcctggttggcagattccatgcgcaacattgcctctgtacggctgtagcccttcttggccaaataatcaataacctagaaaataccgaaggttagcgtacaattcaaaccgaatgtatttgagcaggaaaaaaaaaggcaagataagcaagcggtgcaggaggagggcttagtgaataaacacactgccagatcacgttcgcgtgcctgctcagaagtgagggcttgtgaaggctttgcgatgggtggacacggcacatattgtgccggagtcatatcagccgccaccggctcatgtcttttctggatcatctgggccggtaaggtcggttgtgggtaccggcgaggctcgaaatccttgccgtgagtttccatggtgtgatgttttgcgaaagcggtgcgtttgacgtgaaagtgaaagaaattgatgggttgatgggttcataaagacggataacccgtatgaatgataacgtgaaagtgtgaagaatggttgggtgagaaccgcccgaagcaaatcattgtttggctctgagttgtgatgccttgagtcgctagtcacagaccttgagcaccgctcatgagttgcaacgcgtaataccagcaggtcaataatgcccttcgaagtctgtgagatgaaccatattgtcggcgttgcagataagcccgcgcggtcctctgccatggacttctgtcatcattcataggttgtaacgactgatgaacagcgtaattgaggactcatggcattttcaaaatcatcgacgttgatacaaaacgccccagagtctccgatttggatccctgacatcactttgatctagtggagttgtggccaactcaagctcctcaaactcggctgatcctaaaacacacaggatggacataacgtgcaaggaataatcatcgcaaagggacacagggacgggagggaaacaagacttctcaaacaatgcacaaatgaatcagaagggtacctactatttggttcaaattctgctgtgacatagcaccacttggtggtgcactaggccctggggtgggtgcggaatgaacggggtttccaggcaatggctgctgggaaggcatcgccataccattcccattgacacctggtcccatactgccactgcgtggtccagggcttggggctccaccttgtgccgacatagttgtcgattaattaacgacagcttcgagacagattctcagattggggtggaggatggaaactgagctgggttgcgtgcaatcgcgggcaatttatgatggtgttgggcggtcagctatcggttttttgtctaatgtatgtagcaaacaaaggtgttcaacaatagaataatgggtttgatatcttgaatttgatagttgctacctcaccgcctattaagacctccccaacttccggcacgtgatttcaactaacaagcttcctaagctccattcgttctacactggaaaagctggtggattgattcatacgcacccagctatctgtccttttcctttatatcaaccctgactagtcacaatgagtgaagacgcacccccgcaggagctacctagctatacctctgccgatcgcattcgacagctgaatgagatggataaagtactacgaacatataatttttgcaggaaccctttgctgactcttcttttctttgcaaggatgtcaccaaacttcttcattctgctggtctcgcgatccaagccttgaccaatgccaaaccaggcccctcttctgttgcaccagatggatcacttgactcgcacaaaacgcgattcaaagaagcaagtgcaaaatacttcgcacttctctcctcagccgatgtatccctccgccgccagatctactccttagaggaatcatccctcgtagggcccgagagggcctcgcgcgcaggggacgtaaaggctggagccagaaacgaaggagccgcgggagctaaatcgcgagctccaaactcactggatataagtcggctcaatagccggaaggatacagttggaaaagataaggaggctgaattgtgggcggccgctcgtcaattcgttgagcagatgcagaagccttccgagacaagcaagaatttcaggtcagcgaatgaactagatgatatgcaggtggattgagcgatgaattatcgattcattcggtgcgattggttgagtttgcttcatatgttcatgataccccgggctatctcctgccactggcgtttgagattacgaatacaatgagtgccattggagaagatacatacatttacaccgtactaagtacatatgtaatcaacgctaagaacaaagtgtttatggatcagtgttcgagcatgttcacagaactacgctatgcaaaaagagatgaaacggcaggtatagttcatcggtctagcagagtaaggaaaatattacttctgcatggacatgatcatttcccgctgggtttcccggtccctattcgcatcggacaatgggcccaagcctaggttaatgttagcatattgcaacggcggtgatactttgtgcatccacttacttcgcagctcgccaacgacatcctttgccttaccgaagtaaacctcctctgtgatatgaaagtctaggtcagtccaaaatcctcaagtcgttaaacggtgacgagagaaataaacgtacgtagcaggttccgcatcttcagctccatatcctccaccagcctgcccacattggcgacatggctagcatcagactctacaggcagatcaacttccacctggcgagtcatgttgccgctgaggtccatgtcaccaagagcctcagttttgttggccaggtggaggataacagtactagtgagtttgtaatgggacatgcgagcgcggtcggtggcctcaaaaacgtgaatgctgtcccattcgccggagctctgggaacccggggtgacacctaatcaaaaggaacagttagccacgatctaagatataggaagttatccgcaatatgtccataacgcacccttcttcagtagaatcacgccggcaaatccatcgtccaaatcccagaaataaacactccctacgcctccctcatagtacagctcgcggtaaacatcgaacgactcgttggcggcaacctctagcttgcgcactcgctcactgggcacggtgccatcctcaagtggaggatcaaattcattgctccatggtgaccggtagctatcgccgtcgcggttgtagtcgcagagcagatagtcgcggttgctctgcgggcagcggcgaatctccaggggctggtcaacggaggagaggagatcttcggtgagctcggggacgattgaggtgatggcttgcaagttggtcttggtgtcccgtgggttcaggcgccgaaggaggtcgctgcagaaggggtggtcagctcacttgtctccgactacacggggcggggttgagtcggggtgtgggattgtcatggcggggtatcatagttgagttaaaaaagggtctatatggccatattaattgcgagagagattactcacagcgcgctgtcaaattgtgcatcagccatggttgcgaaggttggttgtatatctgttgctcaacagatggcggtgttgatcttgggcggatgaagtgcgtgtgcattttaggctgcttgcgtggcattacccgacatctataccaatcgtaatacatccacttctatttgcatccataaaaagacaagaaaaagttagacgaacgtagagctagtgatatctgtattcaagctttgttttatttgagcatatttacttcgaataccggcaaaatcttacaaggaaaagaaagataggccaatgtcggattgttggatcttcggagtttttaaaagaaattgagaaaatcattattctcggatgtattcaatgtgcttttctggagaatatagctattctaggcccatcattcgactaagtctgtgagtctggaatatcttgaagatcttcgacaggcgtgtctagaatgcagggagtataaaagagaatcaacaagttgatgatgtgaataaaaacctctcttaagtagaaccagaagagaggctcatctcatcctgccaccacctcgcaaagatattcaacctctccgtccttaccttcgccatctctctccccgtggcagtcttcatcatcccctccagcttaaccaacttgtccccaaaatgctcaatggaattatccatctcccatttcccatcaacacagtacttctgccctacagccccaaggaaagtaaaacacctgccaattccaaccgccccgattgcgtcaagtcgatcggcgtcttggacaaccccaagctcgacaaacccatcttcatcaatcatcctccggatcaacgccggatctttgcattcagtcgtataagaaacatgtgatatgacggtctgcacccgggatgcgagttctggtgtcgcaccccgcgcaaggagcgcgtactgcaccatcgtcgttgggtcgagttcttgacttccaggagctgcgtccattttggataggtactttctgtcaccgatgtcatgcaacagtgctgcgagcttgacgactgccccgttgtattgcgttgtcgggtgcagtgtccgctctgcttccaggatcttgttggcaagcgctcccactctgtgaacgtgtgctgggttatgcgatgggtcatggcctgacatgcagtcagtcacgaaagcggacatttcgttgaagagcgtttggaattcttcactggtatcatccattgttgatgattttgatccggttgttgtggggttggctatttttggttggttcggactgaatggtacccaagacctatgccaacggtgcagatttgattttattaccgggatgactattggttcttattttcctaggcaatagcactatattttgaagaaagtaccgaattatccccgcagtaaacaaatttggcggtgaatgacactcatctcgttttatatacaccgtgtttagtgcaaaccatacaaacaaaacatgatcacctgactacgcgacgcgacgccagatgattgcacatacggagtgcaagtgcaatgcctttcaactatccacgcgatgtcgacagattccgagtcagattactttgatgatgatgacttcgtagtccctggaacccctgatgagccctcccgtcccgcaaagcggcgccgcattcgaaatcgcggggaagagcgcgaagatcaagatgacgattcctcaatcgactcgttctttgatatgggcgatgacgagttaccccctgggcgccgagaatcacctcatcaggatcgctccaaaattaagagctgtgtactgaagcaacccagtgttcaaaatgacatgtttgtcacgcaactcacgcaaccctcctcaagtccggaacgaatacggggcgcacggtggcagaagcctacagtgaggccccctccgccaaaatttgaaactagaagacaagatggtagtggtggacaggagaatcatccccatgatgatgaagagctgctggccgctctcgcagcttccttagattcatttgaggaggagaaaacgaccagagcggtataccaaccctcgagtttgtcaagcaatactgtttcgaaaaagattgtcctgccagaaaagacagatacgcatctatcggcggatgtgctgtttgagctggaggacataccggaaggtgcattcgattcttcgccatcattgtcaccagtagcgcgatcagcccagcctgcaggtccacaatttagtcaatcccgaggcccaattagaggacctcatctcagacagactacattattcggtatggccacttcaaaccctgaggcctcggaaccgcgccaacaagattggggcccgtcagagaagactgaaccaccgacccaacacaaacttgtcaaagatgctttggatacatgggtctaccctacgaacttgggcaaaaccagagactaccaattcaacatcactcaggcaggcctgtttcataatttactcgtggccttgccaacaggattgggaaaaacattcatagcggctacaattatgctcaactggtttcgctggacgaaagattcgcaaattatttttgtagcaccaacgaaacccttggtttcgcagcaggtatcggcctgtttggatattgccggaattccacgctcggagtcgaccatgctcacgggaggggcatcaccgggtattcgcgccgaagagtggaaatcaaagcgggtgtttttcatgacaccccaaacactgatcaatgacctaaagaccggaatcgccgatcccaagcgaattgtgttgttagtcgtcgatgaagctcatcgcgcgactggtgcgtatgcatatgtggaggtagtcaaattccttcggcgcttcaacaacagtttccgcgtgctcgcactcacagcaacgccgggatcaacagtcgaatcggtacagtcggttatcgacggcctggacatagcacgtgtcgaaatccgtacagagaactcgatcgacattcgcgactatgttcacgctcgtaatatcgaaattgaaacatttgagaattcagatgaaatgattttctgtatggatctcctatctgtggccctgcagcccttgcttgaccaacttcggactctcaatgcctactggggacgtgaccctttggggctgactgcgtacggtcttacagtggcgaggcaacaatggatgcagtctgacgctggccggaatgccaatttcggcttgaaaggcaaagtcaactccattttcactgttcttgctagcttggcccacggtatcgatctcctcaagtaccatggcatcgtgccattctatcgcaatgtcatccatttcaaatcaagctccgagggacagaaaggcggaggtggtaaataccaaaagcaagttgtacaacatgatagtttcaagaaactactcagccatcttgaaccatggagtaagaatccagagttcattgggcatccgaaattagaatatctcaagtcagtgattttgaatcacttcatggacaggggtgaagggaaagagttgcctgacggcactagtcagcccacgactcgtgtcatgatctttgtgcatttccgtgacagtgctgaagaggtcacgagagtgctcaaaagatatgagcctatgattcgtcctcatgttttcgtgggtcaatcaagcgccaaaggctctgaaggtatggaccagaagacacaactcagaaccatcgaggatttcaagaagggtacatataacacaatcgttgctacctccatcggcgaggaaggattggatattggagaggtcgatctgatcgtgtgttatgactcgtcggcgtcgccaattcgtatgctgcagcgcatgggtcgaactggccgtaagcgggccggtaacattactctgctattgatgaaaggcaaagaagaagactcctatctcaaggccaaagataactacgagaggatgcagcaaatgattgccagtggctccaggttcaagtttcacgacgatcgttctgcacgcatcttacccgcgggcattcgtccagttcccgataaacgacatatcgatataccccaagagaactcgcaacaagaactgctggaaccgaaacgcaaagggcgagcaccgaagcgacctgccaaggtgttccacatgcccgatgatgtggagacagggttcactcgagcctcgaatttggctggcgacaaaccccagaagaagaaggccactgtaaccaaaaaggcaaccacccccaaaaagagaccccgggcccccacacccgagcctgtagatgttccgttgctggaggacgttgttcttagcacgagtgagcaaaatgatcttgagcatcattatcaaaacatcggtgctacttctccgcaattcatccgattccctcgcaacgacgcctttccacgtttgcaacgcattgaaagacccacaaaggatgtgaagcatgggtctctcacgcgacgcatggtaaaagccttacagaagatgcacgaggctggccctgactgtgatcgtcgattcaaagagattttggcccgcgaaccgccttcgcctgacgaatccagtcagacgcttcggagggattcagccaagaagcctgggcggaacccaaaccctttgaaaacaccgtctaaaaatactgctcaacgagcttccatcaaggccactctcacccccgctggcggggaggttgtttctttgctgtctccagatcgtgaacacaatcagaagaacgacccctttaccttcatggatgatgacgatggctcggattttgagttgatggatgccagtcttttgtttagtagtgggtctaaatcgaagagtcggagacagaacagaccaattattgaagatagtgacgagtgatgaaatagaggcacgcgttgatgttatctggatatagaaagatccttgcctcattcgaacgtaggaatgatattggatacagttgcattcccataactagacctacatgggtacgtacaatactgaactttatcgtcttcattttgttcgtcgcagaaaaaggaacgaaaaggatggtaacttggaatagattgtatttttttggggcttcgcagctatctgtttcttggtgattgtattccattctagcttagggcttgttgaaagagtgcataccactcccgctgccttcaaaaaaaaaaaaaaaaaagaccaacctggctgtaaatcatcaccgagtctcccgtctatcagaacataagaacattcggggttggggtctgggtcattgggtatttgtgtgtttgtgaatgatatcaaacgtgtagtgtcaatccgagagcaaagaaatcagaaagccgaaaacaacccacctcgagagaaagatagataatatgggtttatgcaagtgtttagtatgttgaaagccaacgcgaacgaaaaccgaaaaaggagaaaggacgaaagaagaagcaccagactccagttgcgatcagcgacgaggcgcgagcacaacttctaaatcaatgtaaagagtggagagcaaaggaaaaccagacaaaaaagagtcaattagacgcggtcacgagcaaagtcaaggacctcgcaatcatcctcaaagaaaccgtcgtcggctttcagcggagcggagtgtctcttcttgcggcgggtggtgataacaacttcctccacgttgccggtgctgtttccaagtgtgatgaggttttctatatctccgccagccccaagcgagtgtccatggatgacagcgttttcatcttcgtcatcgccgtggtcatcgctggagctgttgaatgacctcaagtgcactttgatcagtggtatatcattgccaaagacccattgtccactcggctcacttgcatcgctgcctgaggagaagacactcaaactgacacgctggtccgtgtggaacggctggtatggtgtgtttgtctcgatctcagcctgcgagagaggctggcaaaacgatctcgcagcactagatggttgatagctgaccgaaggtagaacaatagaggcatgaactactacttctggatcaaaagtagacaaaggagccggtccacaaggaccctgaagattatcaggcagtttgacctgggactccttaccgccaacaatagagtgaggctgcctgctcttgtggccgggtacagtagcacgcttgaggcggtacatcttgaagtacccggcatccagaacacccaagaatataaggcccttgttgcaaatccacgtcacccgagaaggtgcaggatctcgagctagccccggcaagtggagacgattctctccggcatggcgtagagtattgacagtacccgttgcggcgcccattgacttgcttaggcctgcggcgacaaccttcccgctcttcacactggcagcagaaggtaatgcaaatccactcatattgggaaatgcagcgcccgtggacgggacacgaccacggacagcggagaagaatggctgcgttttaccgccaactaacttcatggccgctgacaatgggttactaccggaagcttgactggtcatctcatctgccatgggatcggtagccggtggcttatttgcagtagactttgcacggcggaatgggggccactgaaatgcgcttcggggtagatcgaaaacgtggacggtgcctttacgtgtaattacggccaatctatcacccaccggtgccgtccaaatcacatcaacgatactcgatgtagtcaaccgtgcgtatctagcaatctggcgcacattgggattctgtcccgtctggtcatcagccataaaagccatggaccggcagtgcttgagttgcatgagatcccacacgtattgcacatcgcctttcttactcgctgtgaacaacatcaagccgttcggagaaagagacaagaagctgcaaccattaggaacctgaaatgtcgacactgggtggataaatgcatttcggatatctgtgccgtcttcgaatcgtcttaggtcgattatggatacggtgtcaggctctgttgctgatgtttgtgtatcctgagcatgggttggagggaataatccatacccctgtgtctggaggtccaatccctgaggtggccgacgtggagagctgccggatggttgctgggtgttccaataattgttccaggcctgcattccctgatcacccatccagcgggcacctctgacgagttcttgggcaacgcctctggccattttgtcgaagaaactttccccttctcctacatctgtcgcacacgacaccgaagggacagcaggaggactgcgagtttcaatgcccggaaccttgccgatgattaaactcgaaggtacagtgccctggatcgatcctctgtaggccgaggatgggggagcgaatgcaagccaccttccttgtacagctaatatgggcctttccagggtagagaaaccatggggagagtcggtgcgagtcccctctggatcagttgtagaacttgaagaggttgagtaacgacgggtttctttggattgaactccagtccatgtcttacccaggcactggtatgcagttgtttccggggataggatatgtctataaacataaacttccccgctgacgccggatgccaagataatgtaagcaccagttgtgaagatctttaattttcccacaggcgagggtgcaaaggatgggaggccgggaagattttctaggcatggcacaggcttacttgcaaacagggtgcagacatgttcgctagtccggaaagagtaaatctcaactcgggtttggtagaactggatgtcgtctcgcgcgcacttgtcgtaggagtgaccgcgaatagtcgaagggggaatttcatttgcgtccgatgttgcagacgagactcgaccttcctcatcatgcggcggcaacggcccatgaacaatgacagccacatgcggccgagaggatgcaaagggatcactagacgggtagccaggcaagagtttggcctcaattacacggccatttaatccagtgatctgccccacgagcctagtctggcgatcttcgatggcgaggatctccacggcaccatcgatcccaaccagtaagacgttcattcctgtccgcgagcctttagatgacaagctaggcagtgtatcaaagccacagaatgaatagtttccctcggcgggggaccgattctgagttggaataatctcaatgtccggtgctccgaagaaatgtgcctgaggaagatgtgggggaggcgcgtgattgctcattgggctcccgtaagagtgactctttctcctgtctatagactgttgcctcgagtgtagaccacttcgataggcattaccatagctagatggtaaagttcgagtctgaggagatgccgaggaaggatggctgaagccactcctttcttgaattgttggaaagttcaagggtgatgtactaggtagtgatgcacttggtatatccccatccataagatcggtgggggggctctttccataaggtaccgattgcgcccacgtatcggtgcggctagtgagatcgtcacctgctggctcatcgagggaaccgaggacatccagaacaggcgacgtgatagatgggtttacatgacgttcaataaagggttcagggtctgggcaggagagaggctcctctggtagtgggtcatatggttggatgctatccgtgaaatctggtgttaatggcactcattcatcagaaaaacaggcaatcaccggtggacacatacatatcatccggtggggtttcagttgcagccctggccaccttgttcttcttgcccttcttctttttgcctttcgcacttggttcatgctctgatatagtccgatgctggtccggggcgaatgggctatcgtcttcgggcaaacggctgtgctggcggatgatatcgtcaggtgccgccgggagcattcaaatagatgatgcctcagtgagaggcgataaagaagcaacagaacgaagccgctctcagtaccttatttgtggtctgagaacggatatgcaggatccttctgttcaagatcctaactgggaaccgggagcttgggaggtatgactaaagaggaggataactttcatagaatcaatcaagtgatcaaacatcacaacggcctaaagagactggggacgcgtacctgttttgacagtatccttaaaaataagggagttgtggtgaacgtagacaccactaacagcgtatctagagcggagatcaccctagacacgcggggaagctttgctaaataagtataacacagcaacagcttgagatagttcaagctggtgcagaaaaatgtaatccaaaatgacttgcatacacaagttccaaggtcgaagtccgaagttgagtcaaggaagaaggatgatgttatggttcgcgataagaagaagagggggggagctgaccccaggtcaccagtcaggtacggggctattagggtgtaataggggggcctgagtcagagcacgaaataaccctctgacagtgtcattcctaatgaaagtatgatcggattctcggtctttactctcctttgtctgtctttgtttctatcaccaatcttgactatgactgactatacaatgcaccttgtggcctacacgaacaagacgcatatgaggggaaacttgtcaaactatgcaaacaccgataaggctcttagtcatctcttgcgtcatggattgcttgctgcaaacgtccccttgctttgacatggtactgcatggttgaagtcaacagccgagtccatccgtgtccttgctggtcattcttgacaattccttgtttgtttattcaataaagttcgcctgttgaaggagtggctggtgtcatcgttggctccagccagaggtcacagggcatttgcggcatggccaaagatgacgacttgcctgggctttgacagcaaatgccgtttgagctaggaaatttgagctctttcgttagggctacgtggtaattcggttcatatatatttacatatatatggccgctttatcctccactattcttgcgggccatgttaagtatatccagactgaaagtgtttgtaaaacggttaatgtaataaaattaattaactcgagacgtgttttgatagccactgagctttgaaatagttgatggtacagaatgttatcacagagggttgccctctctcctgatatgatatccagggtcgcttaggtcttcttcttattggccgcggccttagccttggctgccttcttcttgttgctattgatcatgacaattccgataaaggtgcctaccacagcagaagccaagagtgttaggatgacggggatgcggatggcccaaacacgaggcgggaagatgtcgtggagcgggtggccggggtcgacgaagggctgtggaacaaaaatgagtatagaaaagcaaatattatcataaattagcataccatcaacagggtccacgcggtgtagtagagaaagatcgcagtcgcgaccagaagcatgacggatcccacgagttggcccagctaaagcacagtcagtggggtatttccattggataagactagataatttaccattctgataaagagcggcgctgttaaaagaaaagaaatatgaaggaacgtggatgaatcctgggctggacagaactaccaggaatctcaggagctcccgttattcgaagttggcctctggtcacgtgcaccgcgctagagctttctcctgctgcgtccttgaatcatctagtaacctcagtccggctgagattcacaaccactgttcctccggtgtacatcaaactttctagctaccccggaggcctctctcctcgttgaagatgtccgatttggatgttctccagtctgctgtgcgcgtgcccacgcctccacctggcgcgtcgtactcgccagccgcagcctctcgaaaacgctcacctccatctcgttcccctcctccaaatcgtcgccgatcccctcccggtgattcccttcaagatggttccgatgttctcaaagccgatgcagaatatgccgacgacagagaacggcaactcactgaacgtgttcgcgaacatgagaagcgcgaagcagcgcgcaagccgatgaccgaggaacaaaagcaggcttcagcaaaggcagagtacgaaaagctgctcaccatgcgatctggtggcacttacatccctccggcccggctccgtgcgttacaggcgcaaattacggataaaacgagcaaggaatatcagcgcatggcatgggaagccttgaagaagtcgatcaatggtcttatcaacaaaattaacgtttccaacatcaagttcattgttccagagctatttgcggaaaatcttgtaagaggccgaggattattctgtcgatcgatcatgaaggcgcaggcggccagtttgcccttcactccaatttacgcagcgatggcatctatcgtcaacaccaagcttccgcaggttggcgatttgttgcttgcccgattgattgttcaattccgcaaggccttcaagcgaaatgacaaagcagtctgcatttcctctacgactttcatcgcgcacctctgcaatcaacaagttgcccacgagatgttagcagctcagatcctgctgcttcttttgcataagccaacggacgacagcgtggagattgctgtgggtctcactcgtgaagtcggtcagcatctggaggaaatgaacgctcctatcgcacttgccgtattcgaccaattccgaaacattttacacgaggccgatattgataagcgtgtgcaatatatgatcgaagtgctctttcaggtgcgcaaggatcggtacaaggacaacccagcaatcaaggaggagttggacctagtggaagaggaagatcagatcacacaccgtgccggcttggatgacgagctggaaacacaagacactctcaacatcttcaagtacgatacggagtgggaggaacacgaggaggcctataagaaattgaaggccgagattctgggcgaggatagtgacgaggaaaatgaggacaggtcagatgagagcgaagaagaagaatccgatacggaagaagtacagatggatattaaggatcagagtaatactgatctagtcaaccttcgacgaacaatctacctcacaatcatgtccagcattgatttcgaagaatgttgccacaagctgatgaagatcaacctgccggccgggttggagcatgaacttccatccatgatcattgaatgttgttctcaggaacggacatactccaagttctatggcctgatcggagaacgattcgccaagatcaaccgactttggtcagatctgtttgaggcggcctttgccaagtactacgataccatccatcgttatgaaacaaacaaactacgcaacattgcccagttcttcggccacctcatcagcaacgatgcgattggctggcatgtcttatctgtggttcatcttaacgaagaggagaccacatccagcagccgtatctttatcaaaatcctattccaaaacctcgccgagaaccttggtctgcctggacttcaggcccgctttagggatgatattttgcggccgagctttgagggtctcttcccgacggacaacccacgtcacactaggttctctgtcaactacttcactagtatcggtatgggtgtattgacagaggacatgcgtgagaacctgaaaaccattccccgtcctaccgtgcccgctttgcctacgcgagccgcctctcgaagcccctcgcacaccccatctgatcgatctcgttcatctcgttcgtctcgttcgatgtgctcaacgtgcactggatctcctcactcccgccgttccaggtcaccttcgtactcccgctctccttctagggaccgcggccgttcctattctcattccctcactccctcttcccggggtcacagctacacaccttcacgctctcggtccccagtacatcgccgtcgtgacgcatcagacagtcggtcccctgtccgtcaccgccgtcgtgacgcatcagacagtcggtcccgggcccccgcaggacgatcccgatcccgatccatttcccgtacagcggccaagcgtagtcgagcacgctcccgctcctactcgcgaagcccaagtcgcagtccctatcgatctcgtcgctcggttactcggtctgtcacaccgccgcgccgaggccaaagccctcctagccggagaaatcgcagctactccagatcagtttcccggtctgccaacacccgtacctcttcgtgagccggtttcccgaggttcaaaccaagattcgtccgaatccgtgtcacccttcatatcattttcattgtagatcttttcactagaccaaaacgagtcagcctagtgggggtctacgatcaagtttcattgcgatggctcagggtcgtggaagagtaatccacgaaaggcctatttctcaatatgtaatagagagccttttaacaagaaattccaaattagcttctcggcattttcccacagaataggtcactaattcggttttctatatcgtgtcgtaaatcaaactgcccgagcgcatcaatattccaccttgcaggaattgccggattttgctaaaacgcatgcaccccgcatagtttcgatcccccattaggaacccaaaaactatgtcaaaaatggttcgagtctgaaaggaaaccagtcgcctatgataatgtgtaatgaaagaagggttaacaatcgtatcaaagaactggacaagggcctggcaagagggtagggctaggaccaaggtctggtaggttgagttttgatgctaaagatgagtttattgaacaatgctagcgagaagatcatatggctatagtatgaagccagggtttctgtagagattatgtttagagaaaccccaagataaactgcagtgtagtgactttctagggctggaaggttccaatctttacaaggcaaatttcaatacttcacggtgtgtttattgagaggtcatctctgccctagtttttctccccttcctgtcttgattttcagcgcggttatagaacccctagattccaatacgagagattgccctacccatatcgaactaaactagctctacgcctttctaaaagatcttccacctttactgtaaggatgtttattgggtatatatttttcgtagaacactttactattattggcgaaatatcacgccaaattcctgaatcacctacgtttttgatatcaacttagcttattattgatcaatttagtcgaaaagccaaaagaaaaaagtaagttcaactatagaaatgtctgtcgagagctttgttactgaaactaccactccgaatcatcgctctggattggttcttcgtgctggaccggttcctctcctcgggccttatcggcccaagcctcgagcttcagagggcttctggtgcaataaatcagcacactcctggtggccatcgtgtcttccagcgcactgtgtccatttttgcctctctggatcttgtaaccaatcaactcattggccaaggttttgagactccaagtccggcggaaaggttttgcaagcggtttatacaccgcatcggcagtgagaatcgcagtgtcgatgactgtggagtgtataatgcccaggacgttcaggtcattatggagggcgtgaccaacgagaatagtcctgctatccatatgctcaaaaagcatggcccgagctaccttccaacctttaattgcaacccccttcctgaccgcagccttcatgtcagcacatgttacaccactccatctggtatgccagtttcgaacagtgttggtggggtggacgaaatggttgacgagaacctctcctgtgaggagatccaccactaccagaaaggcaagctcacggcgattgcccataacaccgaccatctcacagtcaatggcaatggcctttcgactggtttggcttgggtttgatgggggagtcgtcataaattcattgtatctgatcacgcccccggcggggcgacgagaaggagcaagaggataactggccacggttgtgaagtgctgtttcttcagctggctatctaggtgaacacaatcttgcaggtggatcaaaagccactgctgctcttcggggttgagaatgggattggtgtggtcatcaggcgtgatgatgggattttcgtgatcctcaagggtgagaatgggtttggtgttgactgtcattttaagcgtagtttggagtagttgtattagttatagaagctcaagttgtcgctcaaatggtgaaagtagtatatggttgatgttgagtttcaatgagatagataagtttggaagggaagaaatctattagggattggagtagacaaatagaaacaaaagtgaaatataggagtcgaatgcaccaggcagacatcgcaaccatgaacagacaccgcagctgtaaaagaaggcgggcttgggatatacttcgaaggttgcaaacttttgctcatagccagtcctttcagataaactcactcgtctatatagatccatagacaggcataatataagttcaactcggaatagtcttttctctttatagatagcgagatgagtgaatttggaacataagccattagccataccataccgtgtcttgttcatcgtcatgctctcgcgaacatcgaccactttctccccaacactaggtgagaacccttgccacgcataagggtccgtctctcggacttcgactgttgccattctatcgctctcacttatcgagtctgactgattctgacaagctggcagagtgtcttgacagccttggttgccggattaatgtcagtccacatggtggagggtttgaagatgaaaacagtgcaggttgcgacatttcaatttgaggagggttcgatacggctcattcccgagtacatcggtcttgccatcttgatgaatgcaattcatttctgaacaggacagaacataagaaatggaaagtcggaaagggccgaatggaactccaagcttgacccctcacctgggcattaccagagataagccagataagcgcaatttataaagctttccccctgtccagatgattttttattttttattttttatttgaaatattttctatcatgaaatatcgtttgtggttggccggcaaagagcaagatgggaatgcagatctgtgtgtgacggctatcttgacacttgaaccagcactgacaagtctacagcattcccattgaagatccggcaactggagagatcttcgcgcagtaagctaactcggagtagcgttcgatcccgtctaaccattgccagatgccacgcagcctcgccagaagatgtcgagaccgccatctccgccgcccaggcagcatataagtccggcgtatggtcgcgtgcgagtcgtcaccatcgtgccgatgtgctagagaaatgcgcaacgcttctctccgattccctcccgcagctcatctcaacagaatcaaaacagacgggtcgggtgattcgggaaatgaaggcccaggtcccatctttgacaaggtggttcaaatactatgcctccctgctaagagtcgaggagcgatccgttctaccgacgatggggaaactgcataactttgtcgaccgagtccctctcggagtggtggttcagattaccccgtttaatcacccgttgttgattgccgtgaagaagcttgctccagcgcttgctgctggaaacagtgtcataatcaaacctagcgagctgactccattgacaactctcttgctgggcaagatccttcgcgaggcgggaattccagacggcgtgttgagcgtcttacctggttatggagctatcaccggtaaagcactggttgagcatccattggtgaaaaaggtggacgtgactggtggcaccatggccggaagggcaattggtaggattgtcggtgggaatctggcaaaatacactgcggagttgggtggaaaggcgcccttggtcgtgtttgaaaaggccaacatcgatacggcgattaacgggatcgtctttggaagcttcatcgcaagtggtcagacatgtgtggccagcactcggattatagtgcaaaactcgattatggatgagctactacacaagctcaaggccaagattgagagcattacacgccgaattggtgctccaagtaacccggagtctaccatggggccactcatctccgagaagcagctacaaaatgtggagcgccttgtcaacagcgctctagatggagggaatgcggtcgctctcatcggtgcaaagcggatggtttctcaaagcccgcttgacggatttaacttcgagaggggatacttctacgaaccaacgctacttgcatccaacaacgggaataacagtattgtaaagacagatgtctggcgcgaggaggcgttcggccctgttattgtcgttgctggtttcgataccgaggaagaagcaatagcattggcaaatgacagcgagtttggattgggagccggtgtatggacactcgaccttccccaggctttccgagtttcggagcagattgacgcaggaattacttgggtgaatacccatcatcggaatgaccctagcagtccatggggaggcgcaaagtctgcgagtggagtcggaagcgaaaatggaatcgaggcttacaatgcctacacaacatcgaaaagcacaatcataaattatgcgtctcccgatgagtccttggctgcggatgactggttcggagatggctccggcaatgttagatatggttgaatggaatcatgttgctggtttctccggactctgttgcacaaatcctcgaagggatcagcatggatattagtgagtgtacatatgtagactaggtaacagacattattagcagaatacttcaaggcaatcgatcatatatcagttagaagagattatgtccagaccaatccacctctcaagtgcatttcacttcggtctgttttctacaaattcgtatcttctggcaaataaatgcataaatacataaagctagaacccagaaaaattagtaggtagtaaatgactgctagtacatactcgaatagccaagatatagatctaaccggtaagggaaatgcatgatgtcatacccatcagcccagatactagcaggttgggctttggttcatttcttcaagcatgcatcccctcaaataaattaatatttatgaaacctgttaaatcaaggaccggtactaatcttcactatgtcaatctggggtcgcagacaagaccataagcccacggagccatctggcacacaaaatggggatgaacatcggcatgcgccagaggaaacattcgaagaacctactgagcgctcaagattacttcctgcagatagtcatgaggggtttctaagcccagatgatcccgccgtgagtccaacaaacaaagctacaccaaataacacgctggaggcaaaaatcatagctaacacgagaaccaggtatcgccctacaatctatggagcgtgcgcgcggtgcacggtgcgtcagttatcgcattggcaatgagcttcatatggtggacattcctgcttgtctccatatttgtcagtccaccgatgatccacccgcgagggtcgggcttctttgccttctcatataccaccttggcgacaggatacctcgtccttggactcttatttttcgcagtgccatccaagtccatgacaatatgggccattatacttgccgttctacttttggttgatatgtttattatcctggctgcgccgcggatccgtcttgaagaaggctgggtagggattgcttctgtcgtctgggtagctttgatatctatataccaggccatccagaatcgagcagttgcttggggtaagcgcgaggaggaagagcgtcttactggtcgagaagagactcggcgctccctactggagtggattgctgttttcgctgagacgattctaatggctgccatggcgagcgctgccgtcatgttaacagcgactctgatcttgcgtgctttcgactctgggctcgaggctccaggcgagcgatacttggtgcatgcggatagctaccaagttcatctcgcttgtgtcgggaacaagactgcagacgacaatgcaccgacgattcttctagaaggtggcaatggaccagtcgaacatacattacaaccgttcatcgacgatgtatacggccgtggcggtatcggcagatattgttactgggaccgaccaggtttcggatggtccgacaacgcaccctcgccccattccgccggcatgtcagcggacgtgctagccgaagccttggctcttgcaggtgagacaggtccatggatagttgtttccgctggagttggcagtctttattcgaggctttttgccagtcgcaaccttctcgaagttcggggcattttcatgatcgatcccctccacgaggcatacttgggagacattgggcgacccggtcgtgggtttttgctctggcttcgtggtatcgtttctccgctgggattcgatcggctcgcgggcgctattttacgcgaccgttctcgccaggaccgcgttatcggacgttcggcttaccagtctggaaaatacatcaaagcaaagctacaggaaagcctcgtggctgtcaccatgactgcctccgagatacagtcttctcgccatatccagatgggccatgctcctgtagtcgttgtgagctctggtcaagaagtccgaaagaattcgcagtgggcagagcgacaggaggatctgtctcatcttacagataatcttttgtcttgggatattgctgacgatgcaccccatgaagtatggcatactggacaaggacgggcgatattggaaagacgtttgaaggagcttgtccaagaaagtcaggtacaaagacccatgagcaagtgatcactagtttgacatctttattcgggcgttcattgggattcaaataccgtacagaaaattgccacaattgtgtcttataaaatattatctctgcgaagctgatgatgggggatatgatgctatggcctagtagtacctccctcgcctgacgcgacgtcgctacatatgaatgaacatcacttgtatgtcggtttcttacttagtagcatctatttcgacgaacacattaatccaatcgagaacttctaccccatatctagaagaaattagaaaagcccctgaagcgagagcatcagtgaatcatctaatctcaggacacttcctggagggctgtaggatgccaactggatttgaggtatattcgtaataaatgcagtaaattcgggcagagctttagcctgctataactagccgacggatccaaaacttccattctcgcatcgaatctccatttcgggtccaggaatcgaagatatctcggggaaaaggcgatgaatggcctcctcgtaacttttaaggcaacgcggtgggaaaaaccgagccgaagggtctagggggagtgcgatgaaaaccgaacggcgggaagacgaaaccgatcactctaaactagctcccttaaacctcttagcaagctggtcactctcggggctgggagatatggaccggggtaaggtggagggtggggggttgcgacgtttccgggtttgggaatccggacgagaaggctcggccggtgtgggccaggggcgcttggggggccgctcaccactctcttgaagaattgtcatcaatgtggcccatcctggggtattcacaagttgcatgccctcggcgggggacttcgttctagcgacacggcagaggagtgattcctcatcctgttcgaaaatgcgagttagcgtcacgtacactagattgaattatacacaatagaataccgaccttgctaaatgtgcctactccatgcaagaagcacaggaggtggaagtcggaaacgccttgaatagctttatctggatcaccatgggacatgagttgctgggcaacgtgtcgaagatcttggctctcgccgatgacttcccgattctcgatagggaagcgactgttgatgaataatggggatggctctgttgggaatccgtgggtgagggtgactagtaggaaatcgactgggaaactcggctcagcgctctcctgtacgcttgcaccgtactcattaattcgtcggtagaaaacttcggggatgtatcgtgtcctgcttccgagatcttcgtcatgctctgattgcaccagcattacggtcgggtctgctgagggttcgacgatatctcctcgaaccatctcaactgcagacacggatgcttggtacgagctgatagcaatcgcacctgtctcatctccactgagcacacacgttacaatatccgagccgaactgtcctgtccggctccatctcgttgacttaggattttgtgcctggagtcgtgccgcgaaggcaatttcgagtgaagacaagaagtatgaatcaatgtgccgcttacaaaccactgaaccatccccaagcccgccatcaatcaagtcagtaaagatgacaccaaccttctgcaatccgcagagacgagctacctcgtccacttcattttcgttgtgccagtcatggagtgttacgccatcgatttcgcccgtttgcgggggctcgtagatcgcttccacgacagccttgacacctagtggtacttcggtgtattcctcgtatgtaccgtacaagaaacctaatcgttgagcgcctgactttcgccagaaatcaaggagggaattgattaaatcaggggatgagaactccacatggtctaccatacggaattcctggggttgcagactgattgcgcttggttgacatttggtgcaaattccctccggccaaggcggatgccccgatgggcagtcgcttcgcactcggtaatatggttcgttgagtggaggcatgaacgaggttcccatttcgggcttgttagtcgcggcattgattttccgcaggtatgagtggaaagagagatgcttgattttcttctctttcatgttgttcgcatcgtaaggctcgagtggcatgcagtaatcacacatgcctcggggaccgtgtctgcacatcttgtagtccattccacgcttgatctttccatcttttttgtctagcagatcgtccagcggtgactgctgcactagctcccacgggttcttgactggagcggaagaacttggttgttgacggatcgggaccgtctgttgcttggggatcggagctccattgagtcggtgttctgtggtggtagatgtgttgccgttcgaggctctatcctgctgtgcctgttcctggtacccaataaagagcttatcgccatgccttcaatccagcggcgcgtgagtaattcaacatgtagatgtaaatatgaaactcaacacttacttgaggccaacctgctgaagcgaaacccctcgtaggtcttccagtagtctttcctcaccacctgtgccgatcggtttattcgagagggcaatggacgaagcttcgacgttgtccgggaggtgttctagaatctaatgccgattgccagattagattttggctctcatcctgctatcgttcccttccaactaagagccgataaatacctttttctgaagtgacgggaagagttcctgcgggctgaccgtgagtcgaaattgtccgtttcgactctcaaatcggagaagaatggaggccatcctaagcaaaactatagcacggttgaggatgaggattgagaggtagtggcgtcaccttccaaggaacacaagtggaagaaatattcgaagacaaagaaggcacatgcaagtgagaagagaagctcgacttaaagcttccttggtcacgtcacaactggcgggcggtatggtacctggctgacagaacaccccgcggtcggctttggagttttgggggaggcgtcggtaaattcgttaccacggatacagagccttgaaatagagagccagaacctggacagtacttataaatactttcaaatggaagtgataacacagaactgcctcttgtagcatcggtaccagaggcaaatttggaaaatgtgagcaaatgactgtaggaggcagaaatgtgccctgagggtactaatcgtggaatgtaactatacatggatatatcaagttgagcatctacgttacaataggctcttgcaaaagcaattgagtaatcttcttccatatatttcttccattggctagaaataattggctgttgaaaatgagaatggtatgtccgtatcatcataagatataaaaaaggcgtaaggaacgccccagtgagaacagtctagaattagagaacgcaagaagagacatgggcccaatcacaaaattgtacagttcttaggcaaaccgcatggcccctcattgctcttcttcttcttgactagctcctgagtatccttgaaaggctgctcggtctttggagcggcctccccagcaacaggagtcgagctctccggctttgactcggtactgccatgcattcactggaccttagaaacagtctcgtagaaggccttgccctgggcggtggcaatctcgagctcaagcgcggagggcttacgggaaccgtcggcagcctgtagacgggatggtcagtgagagaaatgcatcggggagtgtcgttataacttacagcgaaggtaccagcaccccaggcgctaccgccgtgaacctcgtccaagttgctgagctgggcgaatacggtcttgtagcccagaggaacgtagatgaagccgtggtgagcgagagtgctcatcgaggcaagggcagtcgactcttgaccaccaccctgagtaccggtcgacacgaagagaccggcgtacttgccccagaagccaccagtggcccaaatgccaccggtcttgtcccagaaggtcttccactgagccgggaagttaccgtaacgggtagggataccgaacagaacagcgtcgaaggcgaggaggtcagagggctcaacaatgggatagctagccttggtaggagcatgcatcttggccaaaacttcctcgttgagggtctcagcgatcctagagattcaattgttaattaactgactcgaggggcaacaatgatagcatgactgactggaagatctcggcttgaccaccagcggactcgatgcccttcttctcagcctcggccagggcctggatgtggccgtacatggagtactgatcggaaaattagtgagatgggagaggaatgcattgccattggaagacatacatagacgattgcaaccttgggagccattatgacggtttgaggattgtagaatgaacgttgtagagggaaagttgagaaaggaagagcggggaggggaggtaattatgaaggttaacaccctgtcgaggggaatatcctaggtacatcatccaccatattaattaataggcagtttatgtacctctatgattagcgagcgcaacgaagctttgcaacaagttatcagtcatcgatgacagagcaaaatggaacatgattggctgatcaggttccactcggatatagctctggccttagtgattcttactgagaactgacaaatgaagatttacgtgccgagggtgtataactatgcgtagtagagttacgaatctattagtaaaaatgatactccgcaagcgtgcagcttctaccgcagaggggggttgttttagtcaacggaattattaacactaactaatagttcggtctgtctagacagtgcctatcatgatgtcatgtaactaatcgcttctgtgtttaactctatattttggcgtacagagacgtacttgggtccgatggctaaatattaccaccacaaggaatttgggttcacgacactacgggtctatcattgctgcgaaaccagtgtggaatgttcacaccaattatgccattgagctcaagtgaaaagaatgaatttctcgcggatatttttgcgtcagattattcaatagggtatcgcgggactggcgcaagaactcataaatgaaaataaacccaagcagtccgtagaccccttgccgaagccacacctcactccatgccatgcaatgtcaccaaaaaaccccccttgcgataaaaatccatctaacctcttccacgcccgcggaagcggccacgcccaaatccaccgccccgaccacgttcatttcgccattctcgttcccgttctttttcccgttcttgttcttcacggatgagaactcgttcatgctcaagttcttcctctgtcttttcagtacgcattgtaggccgtggtagattttccggccagcgagggtgggcatcggcacacgctttcccatcagggcagaacccggccagatagaatgtacatagacgtcggcggacgtgtcgctttgcacataatggtcccaattcgcaatatccacggtcgtagtgttcgcaaggcggcagtcgtgcctcctctcgaacatgctgataaaggcaatcgtcaccattggtacagtatccagatcgagaaaatgactggcattctggcattcgtcggaggttatattcgtggaggtattcgcatttcagtcctttcttacagagtcccttgaggaaatgtttgcaaaccagcgatccgtgtgttgtagatggcgccattccggaggctgtggtagtcgaggttgtcacacgggacggagtgggatgccgatctggacaggcaggtcctaatggacagtgtccttcactataggctttgcaaacaggtacatcgctggcgagtccgaagccgaagctcttgcgcagaaagggtgtgaaagaaaagtcattgtagctgggatcgcgcgtcggctcggcggataggatttgcgcagctgcgctttcagtttcggcagccatggctcgatgaagatcgagggaagtgttgagattgaagagatgatcagtggtagtcgcgactcgcgagtcaggtgcgtgtattcgattgactatgcccacccgtgtagatgaaattgaacgttcggagggagagtataaatcacagatcctcggggtatctcgctcaaataggcatggagaaggagaatttgaggaagaaggcttagttgttgaaggttgcagagctgtctaggttgttctccagttatcgccttgaaaatcaggtggcgactcggtgtttggctcgtttgcatctcgacatgcgatattcaacaacatcgaaatcatacttattggaaaaggattatgatcagtacatcaataccctcgagtctcgtgctatttgtcttttgactatatacggcaatacactaaaggggggacaaggacgatagaaacagagtgaagattgaaaactatccaatccaatttatttgacagtgaggctgcaactgatatttcgaactatttttattgtcttacccagaatctggatatgtagtatctgtgcacaatgcatacaatctcagggtctgtcgttttcccggctagcaggccgacaatcttttctccgagctttatttgggacattataatatttaacgtatccgagatagttaactagttagttagttagttatgtaaagttgattacatatatccgtttaggattcagtttcagcaagttaatctcacatggctcccttaaattaccttcctagtattaaatagtcccgagactatcgcggctattaaaaaagaacaaatggccaagttaatcaccaggttgcctattctggattttctatgagcttgttgatcatcttcattgcaatgagcgcattcggccatttgaaaatattacttttatctttctcgtaatagccctgtgtatacttcaagatgatttgagacttttctcgtgcaatgtccctagtgaaacggaagcattccagcctcgatcaccgcggggaagtataaagccggggccacatgcatccctccccatgccctagcctcatccttcagactatcccagcgaatcagatacccctgtacccctgtaaacgctgtgattatcaaatcgaaaaagcaaaagttaactagcaaaaggccaaacctacgtcgccccatctccttgttctggttattggcttcgcaacaaaacccctttcaccggggtacccagcacaagctagattcgtattttcacgagtcatgatcgtccacaataatatattgttcatgacgatctgccgtcattgcaaaaactctcgaacacggggtggagtgcattgcctcatgcaggcgatccacgcttgtaccttagtatgaaaatctctttgacaggattttcttgcgtccgctggttagatcggaccgcaggtcatacggacatgaccggacacaatcctcccccatgtgtcttggatctaggacaattcatgactgaactccgagacagaaaccccgcatctgaccatgcaggcatccattgtgtacaagttgacaacgtacttctgtttggaaaatgctgcgcatatgcttagcccacattctccacatctttctgtgtccaattgctgattcggccatctatatggagcctagtcgggttacctgagatttgcatctgcaaactgcctgattatacacttcacctaattagtgcaagtgcaatagagagagtacgaaaaggaacgaggcgaggttccacgtgacgtattcccaaaagggaaacacacagcattgttctggggcccttttcaacttgcaattcaattctttctcttcttttctttttcgttggccttttttggaattccattcagcttcagtgctttgtgtgattccccccaatgcgcgagctctcacacttctcacctcgacgtcttgaaaatgttctcagcttccaggctcttccgccgacggggcgcggatcgtgaccccgctgccgagtcccacgtctcatacgaagtgccactgtacacaaatgcagcctactatccgaattggagaatctatcgaaaggaacctccttcatctttgcgcttgggatttatctcacatgtgttctacgcatttgcctggtaaacacagccaatcaccgccattcaagagtccgggttcgagcagatggctgacgcgctaatctcaaattggtttcttgcagggtgaaagatgacggaactgtctatgtaagttttaagttttaatcacgcacctcctctaatgtgggaatatttactgacgctgcgtcatagctgagcgatgagtgggctgatacccagatgcccgttgacggcgcagaaggttgccttagagctttcgtccaattgaagcaacagtactctaagatgagggtcatcctctctgttggtggtggcggaaaaggcagtgagaacttcgccgctgtagccagcagccattctcgggtggacactttcgttcgcaccgcgcgggaactggtggatcaatttggaattgatggaattgacagtaaggccgcgtatctttttgatgctgagacaagtcggatgtacatgactaactccatctgctatgcagtcgactgggagcacccctctgattccaagcaaggaaaggattatgttcgtctcctcgcacgtctgcgggaagtgctacccgctccgcgttacgtccttaccaccgccctccctgccggccagtgggcattgcggaacattgaccttgctgccgcacaaaaacatcttgacatgatcaacctcatgacgtacgatttcgcgggaccatgggaatccgagacgggccatcaggcgcagctttatggctcaggcatatctggtgattcggcggtttcttatgttatagggcaaggagtgccccctagaaagatcattttgggtgtcccagtttatggacgatccttcctgggcagcaacggtcctggtcagcggtatactggacacggtggcgaagatggtgtttttgactatcgcgacctaccccgaccggggacacaggagtattatgataggaacatcggtgcgtcattctgtgttggagctgatggcggtttcgtcacatacgataccccagaaacagtaaaacagaaggcggaatttgtgacctcgtcgaaactgggtggcctgttttactggcatgtctgctccgatgcccgaggaccgcgtagcttggttgagacgggatacaacacgatgcacgagatgtgagggctttcggctctttgcaaaagcaactaaatcaaaaatcagaatctcccatggcgcgctgacatcctcaaaaatggtataggtagctgtcattattttaacaattgtctcccaggttcttggttacccctagtccatgactatataggcttctagtaggaacggtaaatatagaaaatatcatgtttcagggtataaggtgaatcgtgatacggcgcttttgcgggcagatttagtactttcactttcattagacaaccgacagccgaggtttacgcagtcctataccccagggggccaaacctccatttttagcaaatactgatacattaatgcctggtttgggccgtctccttgaggatagggagaagacatcttagaaaagacacctagaaagacatccaaagaggctatcaagaatactaactaaatttggttagtcgaggctattcttgcaatagtaatacaggtattttgattcttctaccgatcccaattcagatttctaggcctaaatcaaatatcaaggtatgacatctataggactgcgtagccgaggttcatcttccccgcattttcaactgctttatcaaactcactctgcacattctatctgtcatttccccgtcgtattcacttataagaatctcactatgtcctactcgcagcccgcgacagcagatagcggctacatcaccgaccccggcccattggagaatacctacacgtcggatcccagcctccaacggacactggcatgtgagtttttcattcatatgtaattataataataatttctaaacataatccagggtacctatcatccgctgtatttcaatctgtacaaccgcatctcactcagttcggtgccgaggctatttcagaacaggttcgcgaatggagcgccgatgctgagcgcaatgtgccatatgtgaagagccataatgtctggggtaagcgatatgatcatgatcgattggtaaccacggaaggctggaagcaactgggcaaatggggtgctcggaataggtgtgatctataaatcgtatatgacatgcatgatctaacttgatccgattaggatcgtctcggcgggctatgataagggcttaggggtcgatcggcgaacagttcagtatgcgctgtgggtatttccttgtcgatctttctatgctatcgctaatgccatgattccagtacctatttgtactctccttcttctggactctactcctgtccgattagcatgaccgatggtgctgcttttattctctcatcgaaaattgacacgctgccatccacgcatcctttccatgctgcgttccaggggctgatctccgaaaaggatgatcactggacttcgggccagtggatgactgagagagccggtggcagcgacgtccaaaacaccgaaacatgggctacctactcgccgctagctactccttccggctcctccggctccgacctccttggtgatggcgactacctcattagcggattcaagttcttctcttcggcaacggatgccaaccttgctcttttgctcgcgaagactccatctggaaagctaagcacgttcctcgcgccattgcgacggaccgtggtagatacaaacggtgtctctaaagttgtatctaatggcgtcaagatccaccgactaaagaacaaactcggtactaaagaattgccgaccgccgaattggaactaaaggatatgcgtgcgcatcttcttggggagctagaccaggggattgtaacgatcgcgcctcttctcaacgtcacccggcttcatacctttgttggttcgcttgctggttggcgccgagcaatgagcatcacaaagagctttgcaaaagcgagaaccactgtcggcgaaccgctctggctgatcccaatgcatttacgactcttggcggacttggaagtaaagcatcggggtgcaatgaaccttgcgtggttgacggtcgctttgtttggaattgttgaagatcaaaaaccgtcgtctaataagctcgcgcatctccctcaacctggcaaggaagcagaggtggttttccgtaccttgactgccactgctaaggccgttatcagtaagatggccactacgggaattcaagaatgtcaggaatctatgggtggagtcggctatatggacgaggctgacgagcccgagttcaacatctctcggattatgcgcaataacgcagtcaattctatctgggagggtaccacgaacgtgctagccagcgagtttgtccgcttccttatcaagaatgacaacctgaagatatttggaacatggcttaggcgtaccttggccctgattcagagcgcaaatctgcagaatgccctgacagctgcgtggtcagctttgcgtgctcgttttacggctcaagatcccgcctcaactgttgctgatggccgtcgctttatgttcactctggcttggattctatctggtgctcttctggcgcttgatgctgaacgtgataatgaccttgtgacgacagagattgctcgacgctggatcttgagtgctgagggtggcgtgggagagcaggtgttccacgacattgttatagttaggagcactgctagcactatctctgaaggggaggaacatctgcaatgggactgtcgtattgcctggggagttgacctgccggcgaaccgtgcctctggtcatcgatccttgcaaaaggcaagctcgaagctttgaatcatgaaggttgatgccatatatagcacgcaatcttagctggcatttttgacgtttggatttctagctgatattggatcattctacatatgtgaacacgcaatcaacactttgcctgaagactagtagttttcattctttattttggtgaataatgacggatggggggaaaagacgtgctacaaatagaagcatacaagcacgagaatacctagttcgcaagccagctcctgttgatcaggcaagttgaacaataatctactaaatgaagcttccgcttagtactatattccttcagcttcgtgcggggactaggcgtcacatcagccgagtagcagcatcaaccctatgagatgcaccatgcatcgccgatataaccgacttcgaccgatttccaccgacaatcaccgaaagaagctatagtatcatgggtgtctctaggaatgcgtcagatttacccgaacgagacatttcatgcgggggttcaaaagccgggtgccgacgggctattggtgtgattatcgagattatctgctactataaatcactttataagcaatcccaattctacgtcttcaaaatcaaaaatcaacaattgacaccaccacagaaacagacaagaaatggcaagccctacgaagagcgagtcgagcgacgctctcaggcctcgtcccatctgggaacctaccatcccgcaagaccaaatacccatgaatatctatcgtgcgcatatcaacaagaagttcaatcagcagcttcgctcttctcatgatctgcatcaatggtccgttgagaatctgcaagatttctggacagacctccatggctatacgggaattattccaccattgcctccgacagtaacatccgcatttgatcctagcacgccaatggacaaggtacccaaattcttccacggagcaactgtcaactatgcggagaatgttgtgtctggtcgggacttggacaagacggctcttgttggagttcgagagggccatgatctgagtggggaggtgtggacatggggagtgttgagggagaatgtcagaaaggcaaggagtgctttgctcaagctcggtgttaaagaacaagatagggttgctgctgtcatctcgaatagcgtctggtcggtcggtttgttcctggcgactgcgagtatcggcgcgatttggactagtattgcaccggatttgggtgaagaggtatgtctcgcaggaatgggaattgctgtcgacatcggagactgattagaaatactagggctgtgtgtcacggttacaacaagtcactccacgggttctcttcgcagatgccgaatccacatataaggggaaaatgcgatcgaacgtcgtcaagatcaaaagcatcgtgaaggcattgcactcaaagccacaggtgtttttgattcctatcatcggcgcccatgagtcggcattccccagtctcgatcgcttcttgtcaatgtcacggcgagaggacaggctagggttcaaaagagtgtccttctctcatccactctatatcctatacaccagcggcaccaccggtcagccaaagtgcctggtgcacagccatggcgttattttgcagcacaagaagacatccgtactgcacaactctttgacatccgaggatgttgttttccagtatagtagtacctcatgggtcttgtggaatgtcatggtcggtcacctctccgtaggtccgactctgattctgtacgacggatctccgttatggcccagtgccaaaggactggcaaagattgcggggtaccataaggtctcatactggggttgctcccctcgctatgtacaggagctcgagatgaccggttgtatcccaaagaacgaattcgatctatcctccctcagaatggtgcagacaggtggctctcatctgggtgaagaccaataccactggttctaccgcacattcccttccagtgttcatctcaccagtgtaacaggcgccacggacctggcgacttcttggattggaactgaccctgcaggtccactgtatcctggggagatccagcttcctatgcttgggcacgacttggacattgctcatcctctcacgggagcttctatcaagaacactggaagacatggcgagttcgtctgtcgcaaaccatttccatcaatgccagtctttttctggggcgatgaagatggatcgaaatacaagagcgcctatttcgagaaatttgagaattgttgggctcaacacgattgggcgagttataacccgcaaacaaaaggttggcagattcatggaaggaggtacgttttatttctctgtcggaataaatttggggaaagtgcgtgctgactgggaaaccgacagcgatggtgtccttaatccacagggtattcgttttgggtcttcagatatatactcgatcaccgaatcagctcctttcaactcggtcatttcaaccactttctgtgtcgggcgtcgacgatctcacgactctgatgaagttgtgtttttgtttgtcgtgatgcagtctggaaagccgttcacgggccaacttgctgtagagctcaaggatgcaattcgcaaaggcttgagcagtaagcatgttcctcgcttcgtgatcgaggtcaaagaagtccctatgacggtcaatggtaaaaaggtggagacattgataaagcaggtcatttcatctggccagcttcctaagattattagcagcaccgttgcgaatcctaggtctctagatcacttcaggcagtattatgatcttgaggtccaaaacaacaacagaagcaagctatagacgacatgctgtctagcctatacaatagacaatgggtggtattttgaaagagaaatgagaaaggaacttttgtacatgaaaagaaaacaagacatacaccgagaccgatttatgtatcgccaattctcgagctttgtcaagttcatatattgagtagccaggagccactccagtcaaatccagacccttcccaattattgctgaatgggtccaagccaacatcaacagaggcaaagtcgtaagtatccacaggttgtcccggcggagcgtcaagggaccgaagggcatcattgggggtttgaatatccgccatagtgcaggtaggcgagatgtccgcatccccacttggggactctgaggagtgtccaatgatttgccattgtttgcaaagttttgtatcgaatccctcaaagaaagaggctgcgtccaggtcgagagtaggcgatacacccccaaagggacccagctctcggactttctcggtcaagttgttcagtgcacgcaatggtccgaccgccgagagccacctttcggatagcttttgaagggagagcttcatgactgttaattcatgttcggcagtattctgcaggtgggtatagcgacagctagaaaggagtgacagtccagcacatagtggatagaaagcaaagacagggcccaggtatcgaagctcatcgcgaagcaggaattcctcgtaaattccagcaataaacgaagatgctaccagcgatgctgcgggtggaacgctgcctggcgtaggcgagcgatggagaatagtgagcactacgaaatacatgaccagcacttgttggatttcgaaattgcaagtaaccgcattgtcttgaggtgtcacacatgatcgtaatcttggaatgacttgttttgcccatcggtagacggcgttctcgagatcgacctgcctttggcgggagatttcttgtcgtagatgggactcgaccgtgtctcccagaagccgggatatcgtgcagtaggctaggaatagttgtgatttgaagttgttcacggggaaatcattaagtgatggcggaaggacatcgctgtcgcgtagattgatagttcgtggtcggccgacgccaacagaaattatgttgtctcgtacctaagtatgttagcccatattattccatgtgttgcagattcagggggagacacctacaacgagagaccaccacagccttctccggagaccccgatctcgggaatttggcgagggctccttgtgtagcccaatctgaaacgccattgctccagctgttcgaatccaaaacccactggtatcggtagaaacatcctcgggcccaaccggattgtaccaatgcagtaggcaggctgccacaatagaaatcaaagggtcgtcacaaccaccaaaaaagaaaagtagttttgctcgtcgatagaacacttcgctggacccatagtcgagatgagctttggaaactctacttccagcgaggaagacagactggagaagcagcattgatcgcggcgcactctcatccagccatttcgggtccacaaccggtgtccaggatgcacagtgcatgttaaagctggccattagttctgtttggactgagactggaggtaactcaaaagcaccctgattgcggagcattttcaagtcagttgctgatgctttggggctggtgtatgtggtttcgcgaccaggtttgaccatattttcatcaaacgggacgctgccgccgatatattcactgcggccgcgatagctctcctctttaataaaaggctcgccattattagcgatcacggctgtattggtttcaattggaattgcctcatgagactcgctcaaataattccgctgtgaagctacttgtgcctccggtgactcgggaggaacctgtgagctccgtggtgtctgactcaagggagcagacgttgacacattccgccctggtgataggctgttggtgaacctcttgcgctttcttgtatatggtctgaaggaagtcaattattttgattattcgacttcttttgaccgggtctacttacctgcactccacatccgactttttgcagttggtgcaggggtcgtgcgtcgcaaagtcgcacctcacctataaccgttagcaattattcgggaatagcccaatagatgatcaatgacacacctttctcttatggcatattatacatgctgtagacatggcgctattaccgacagcgtagatccggatgacgatgatggttggaggtcgagggcggggtttagccgaggcatggaaggtctataaaatgctcaacagcaacatttctgtctttttttcccactaaaagtcccctgtttttagacatggcggaacccggcagagttacaacagatacttcctcgtatcctggcatctcggtggtggcaatcaatcgccctgataggaagaatgccgtcgaccccttgacagcgaaggcgctttacgaagccattcttctttttgaaaatgacgcgaaacaaaaagtatgtgtcctaacgggtgccggcggtagcttttgtgcaggagccgacctccatatggttgcacaggcaaacaacgacacaccgagcgacaacctccaacctgtcaacggtcgcaacttagggccaatgggtccctccagactcattataaaaaaaccagtcatatgcgctgtctctggatatgccgttgcaggaggcctagagctgagcctactcgcggatatgcgtgtcgttgaagaagacgcagtcttcggggtcttttgtcgacgctggggtgttcctctaattgatggaggaaccgtccggctgcaagccattgtcgggcttggtcgtgccttggatatgatattgaccggtcgggctgtgagcgcccaggaagcgctgaccatgggactggccagccgggtggttcctaaaggagaatcattaaaagaagctattgggatagcaagacagctcatcacattccctgagttgtgtctcaacacagatcgccattcttgctactacagtgcgtatgaggcatcctcgttccaggatgcgatgacccaggagttcaatgcagggagcaaggtgatttcacaggaagccatagcaggtgcagcgaagttcagcaaaggattagggcggcatggcagcttcaaggatcacagcaagctgtgaagagaaagaggcttccattgaacgttgaaatagttcacattatcaaattaatattttggatatctaaaaccaattatcactggtggcggcagtgatgtgagagcttattatgctaatacaagctagacatgtatgttcagaaatatgccgtattgcgcgaatatagagggactgcacgacgaagtccctagttgattttcttttcggtttcgctcaagtcctccgaggtgaatttgacacgcttgccgtaaaccaatggagtacgagaaagcaaggagccaatggcatatccgatgtaggctccaacaagaatcgtaattgggaatgcctgccaaggtcggtcccttcatataccgagttagccaggtattccgcatttgaagtgcagtatgaacgtatacataccagtcaagaggaataggaatagcgccaaaccacgcccccaagcctgtaccgagcgcactgccccagaccgcatcagcgggtcgggcaatgccccaaacctcgttccatacgccgcggtccaacccgtgggcgtagatcagggccgtcgcggatagaacggccatgtgggccgcacacaggatggtctcggaattgtgggttgtgagcggggcgccgaatagaaccaggaggattgtcagaaccggggtggccaagacgaaggtcagggagaccgagaggagggccggctagaaaatcgtgttagtatcaatcacacgcaggttccgcttaattggagagatatcgcgtaccagtgaccgagaccaaatgcatgcccagctattggcgtgctgcttccgctttccatgtttgccatgtcgcgcggcaccaccaggcccagatggccgaggacttgacttcacatcagtcggggcggacgcgctcgtctctgttgatgtcgacccagcgggcggaagacatacaatcacgtagaagatttgtataagggtgagccatggtagggtggaaagaagctccttagtaggattagccaccaatgcttcgaaacgagtggcacccaatgccaaaaggagtgccggatgcgcaattgagtagatccgggctatcaacgaggggaggatgttgacgggaggggcggaaggtttctcgacgagcgtctggggtgttgaggaaggagcccctagcgcggaagaggtgtcttggggcattgctgggttcaactggcagttctctgtggaaaacagaccttgagaagctcccggttgattcagggtggaaatcggagggtcttgaatggagatgacagctcgatagtgattggctgtggccttgatgtcttaggcagaacatatatcttgccttgcccttcaggcaacaacttcatttccgagttcacaaatggattgtactacggagtaatatataactatgcagtccatgggattgtagcggccctcattacaagctcatggctgacatattattcgttgggcttcttatcattgtgaaaatgtatacagctgtctcgcattgtgttcttctcttttatctccagtataacaacatgctagcaagccagaaagacaagtcgcctacctacaaaaccgcctccagtctcagaggaaacaaagctgcactcatgaagtcgccccactttctatctcaccgattggactaacatggtgagctatcgatgggtgttgtacttttgagtatgaacatggttgcactgtgtctacctaaatgcatccagcaagtatatataagcgccccagatagatccgattaagaacacacaagaaaggcaattgcttcgttctcgatgaattttgagccgataaataccatcgggattggatataacctgacgaattcttcaggatttctccggcgcggcacttcggccgcagacacactacagctatgcagaagtgcgaaataattgaaaagcaacatccctatttttgtcatcgggttcataacagtataacagaccgatatcgcaagttcaacctaagaataggacgagatcgaaaaaaaaaaaacaagaaaagagaccaagacagaccggctgcaattgcagagacagacatacattcattccacatggcaacgtgatcaactgaaatccggaaacgggctaataatatgaaaagagcttcggaccattgcaggaaggcgggggtaggtgagagcaatgggataaagaatacatgagggtcgttcaaagggaacttgggttggcaccacaccacccaatcgagagcaagggggatggaagtgcaagagggtcacgaatacgagggcaaagcccattcatcacaaacgaagataaaagacgagaaaacaatatcatccaacgcctcgggcgtcaatgctccgtgaataagccatacccttttaaatggtcaaacaaaacccgcacaactggataaaagatagaggtgcaagccgtggaagagcaatcatgaaagcagtcatgaaaatgatgggagcgaggagtggaaacactgtgcgagagcactttgaagtagatcaagcagccgaagtggacggtcctgcgatctcttccaagatctcattagacaatggtggctctggtgcggacacggactcggtagctggcagctgagcggaccccttctgttcaatgacaggtacagacgcagatgctgcggggctatgcggctcttcgggaatagatggaggaagaccagcgccaggcaatggagacacaggcgaacgtatatgctcttccttgggctgttcacgtgggacttcgaccgaggcatgattgccatttgtcgactccgtagcatttggagaaagaggtcggttggtgagggacggctcgttctctgaccgggtggggctttttgtgcgctcgcgatcatccttaacaccatcccgaacttgagcaactttcgccttgaactttccaaacaggctctttttctcgggctctgatcctgcggaagaggtgccttgaacgccagcatccaagctcaatgggtggttggagaggtcagtgctttgatattgaccgctgccgattgaagtggtgctttgctcggctcgaggatttgttgctcctaggggtggagacgcgaaacctagtccaagttgctcgctggtgcgcttcggagaccgatgaaatcgccaacttcgacgattttcatggcgagtgacatcatcgggctgatccatatcggactgatcagtaaaagatgagcgtgagttcatagagggcgtacgcgacttgttaggtcgcagagagtggtcagtgtgatgttgcaaagtaccctctacgagagccgagttcgagtcaaaggggttctcccggttgccgagtgtcgcagcatttggaggtttcggagtggtgtcaccaacagcagcttccacggaccggttttcgtgtttaggttcaagatccgcactgtgagctggagtcgaggcatggagtgaattagtcgagctttgtgcgctcatgcttgcgctaccgggaatgcgcttcttcttcaagcgattcggctgccgatgttctctcagttcatagtcaggtggcggtgacttcgtgaagaaacttgaaagcttacgctcacgactcggagtgacaacctgtgggggtaaagtgaccgggggtgagacgaccgtgttgagattatcatgtggcctggtagtttcgttgatgacaagacgttcagcagttgccaggggcaatgggccatgggttgacgtgtgcacatatacgttgcctggagtcaatgatgcggttgattgactagggatgcgctgctcaggacgctgctcggaggtctgttcagggactggccgaggaaccggatgagatacagactcagggatcggctcaggctgctcaggctcttcgcgcactgatggcgttcgactattcgatcgagaactttgatgagaaacagagaggccggaagggttgttcgagccagtgtcattggctcgtgcataacgagcagaggtcaaaacggggcccatctttgagggtagggtgttgcttcggtgcacaccaccgccaccaccgccagtgattgaggtgggagttacagggctttgagtgttgttagaatggcgggagttgcgcgacgaaacggagacatttcgacggatactgtccaacttgcgatggctttccgtgttcgcactagcgttggataccgatcgtcgaacggtggggtgaggtcgtgcaatccctgcctcaacctccttcacagtctgctcatcggcagccgtgccgctcattccgaacaggaagtggtcctggttctcaatcaagaagatcaacacatcctgacttaacttgtattcctccggcgacatatcatgctgcgggtgggacagcatgcctggttggaagatcgcggacagattagctgacggcatgcgattctgatcggactttgaggcgaaaaccgcgagaagatcgaggatatagaggaggagctgcttgttcaatgggggcagctcgatgatgaggttctggtatgtcgaaacagcctttgcgtggtcgaacttatcggcgtcggttgtgttcttgccttctaggacctgtcgttggtagatccgcagaggttcacggaagcgctcataaaactccaatggtacgatgggttcggggagctggttcaggtatcggcgaagtacgtttgctgcatcgtggacggtgtatccggaccaatcgagtcctttgccatatcgctcgggggaatcaaagacctcctggaggtccttaatacgcttggctgatccgttaagacgaaaaatgccttccacatccgttgctatccaaaaacgtcagcgttaactcatcgagtacagcaaggtaaatgcgaacctttttcttttagaaacactccacactttgcaacaacaatcggcacgtatccataaatgaagctctcgccgtggtcgttggtcaaggagattgccacattggcatacttgatgctgacattgagcgcaatcccgaagatgccgcggggtgcctcctctgcgataaacgggtcagcgtaccagttcaagaaacgataaagaacctaaacaaatcaattggaaagcgagcaaagtccccagctccgacatgttgaactgcaacaaccatctcctgtgcgacgaggggagtataccccgaggctcagggggattgcgaaccgccgcgagccggagtagctcaggaaatatttacgcgattgcctgtattctgatatcgcattcacctgatatggcttacctttcaattcatcttttctggtgctccgtttgaactgcttccaccatgaagctaaatctcgctttgatggtggggagttggcgctgaccggatcgggtgaggtggggagagggtgaacggggtcagcacccgggtgcgacttgccgaccgtcaccatggcgagtccggaggacgactcgagatagaagcgaagatactgggaagcgaaaaagcgcaaagaggtgggtgtgtcgatcgagggattcgggaaagttgaaggggccctgcgtcaccgccctcgtgtgggaaatcctggggctgggcccaaaatagcacaggcacgttaccgaggcgaagcagaacagagatgggatttgagaataagaacctgagaacaaaggagttgagaagaaaagtaataggggatgtgagtatgtaagtctgatggatgaagggatgcgaaagggctaagaggtcagggtttcgaaagggtcaatgggggggcacgagccaagagccgaacacatatgacagagtttattctctgtattttaatgacagggacttactgatcagggggattttcattctttttgcgaacataagactatgaatagcacaatctaaccaaggttcccgggacaagttaaagatgggtcagggtcacctgtcatatagaattggatcattgtatggagtgcaggtacgcaatattctagggatttggaattctctgtcatttgctacatagaaacaccccgatggagtaaaatacagatctcccaatactagcttattgtagaatttctagaatttctagaattacgagcataaatgtgaagagccggccccgcctgcgagtagtctggaaccaacgggtcttggattgtctggaacgtgtctggaccctttcaggaataattttactggagatcagtcgcttatatcgggtttcatattttccggaccaggtaccgattttcatttttttctagtttttcaactcgcttgaccttttgagttagcgtgaccaataaagtcgacggagtatacatttagagcatatccattgtcacttgatctatggaaatggtggcttaggtacagggtacgaggcatcatatttacccttgggtctgtgcattatttccatcctatttttcagagatcgtttcagaatgcatgctctaggtacatgtagtttttgatatcttatacgtcatctggatcaccgaaaagtgtaaataacacgattaaaccagataatctttccggcctttggttgtatctttctatctatggctcaccccttggactagtcataagtcattgaggtgggattggctgtccatagcgtcatgaagtgaggttggaatatcggtgacgttgagatatcacgtggactgtaacatcgaggtttttggcatatttatccgatcggagaaactatcctgcgggacagtaggtagaaccgtagagctaacaaagcatcatgacaatacaccgatctagctggtacaatttctatgaagattgatctcccacaggcctggattttaggtaaactgtaaaattgctgaagtgaaggccctatgggctagacaactaccaagagaggagatgttgattaattgatggcctagtagctaaggcataacattttgagtcgcgtgggctattatttatccggcacccgagaagctcagaaccagcggagctgacagctaacagaatgacttgttgaaagcatcttaccatcaaaacatcttgatcttattcatctatcacaatggaagggtaagtacaccctttgaaccctctttaatttttttgctatgttttctatcccattgttcctgagggtcatcctatgagcaagccactaatactcaagtcacagacttaacgcagcggaacagcgcgagttcgcctcccgcatggagcggaagcagatgaaggagttcatgactgtatgtatctcctagcttcattgttcaagattcaagttcttattcctctgcccatgttcctccttgccatcaaccacctgtgttctcccacgctcaagatctaacatcttctctttcagatgtactccaagatggtccagcgctgctttgatgactgtgtcaacgacttcaccaccaagtccctcatcaaccgcgaggagacctgcatcatgcgctgtgtcgacaagaacctcaagagctccgcccggttgaacgagcgcttccaggagcagaatgctgccatgatgcagagcggctccatgggaggaaactaagagtctattttgataataagaaacatattgtcgatgactattctttatttttggcaacatgcattcgacaaattgggtggttggcgatgcggctcgatcgacccggttgtctccggcccgacagtggctttatctggaggtttagagggatgataacatggtcgatgacctgttggcggggaagcgaacaagatctgctcctttccgtgtacaatagtgattagcacgggagatatctaactctcctctcccggggctcaaaatacaaaagacttgaccaaataagggaaatgagatgtacgtgaccgggctcgcaaatcagagctcagcttggattatatttgtcttctcaaactcgagatagatcctttgttgctatcaaagcaatgcaatttaggcttgtgaagcccgagggtgcgtattttcttgtttattcattttccttggcgtacacattcgatgttccagtaaaactccgattccatgctataaaccgcgttgccggatggtgaataccactattctgcgactaatgcggtcggagtcgtaccgtgagaggtaatactattatatacgtatagtgcatccggacatacagggtaggatgtatacaccttccttttcccgcggagctcgggagcattcccgatcacgcgtttttctattcggaaatgccttatcgtactgcatttccccaagtgaggagaaacatatgaggggacttggaagctgtccggatctccaacttctcaaatatttgatgctttatctttcccctcattcccggatccaccccccactccttcaaaagcccgtcatttcctcttctcttcttccaccaccgtcgtattcttgatgtgagtcctttttttcccccttggcattcctgtaattgctaacagtattcgcgttagaaatcaataagcacaatggccagtacagtaggaaaggtaaattactttttccttcttctttttaactgaataaccttgctaactcggaaatctacagacaatcacttgcaaggtaagctcgatccgaccgccccgcatatatgacgtcgaccagcacagctcgaatctgtgagtcatgaatattgctgaacaaattgacaggctgccatcgcctgggaagccggtgcgcctctgtccgttgaggatatcgaggtcgctccccccaaggctggtgaggtgcgcattaaaatccaccacactggtgtctgccataccggtaagccccgccatcaaccccgccctataaaataaattgccgaaaaaaatccgatctatcagagccatgattattgacatccctcagatgcctacactctctccggcaaggacccagagggtgctttccccgttgttctcggtcatgagggcgccggtattgtcgagtctattggcgagggtgtgacctccgtcaaggtgggcgactacgttgtcgctctctagtacgttttcggctccgatctcggcgttacggtccactgacaattgtagcacccctgaatgccgcgagtgcaagttctgcaagtctggcaagacgaacctctgtggtaaaatccgtgctacccagggtaagggtgttatgccggatggtacctcccgtttcaaggcccgcggcaaggacctcctgcacttcatgggcacctccaccttctcccagtacaccgtcgtggccgatatctcggtcgtcgcggtcactcctaagatccctactgatcggtcctgtctgctcggctgcggtatcaccaccggttacggtgctgctgtcgtgactgccaaggtcgaggagggctgcaatgtcgctgtcttcggtgtcggctgtgttggtctgtcggttgtgcagggtgcggtcaagaacaaggccggtatgatcattgctgttgatgtcaatgatggaaaagaggcctgggctcgcaagttcggcgctacccacttcgttaaccccactaagctctccggcaagaccattcaggagcacctgattgagatgactgatggtggctgtgattataccttcgactgtactggtaacgtcggggtcatgcgcgctgctctcgaggcctgccacaagggctggggtgagagcattatcatcggtgttgctgctgctggtcaggagatctccactcggcgtaagttcccccccgctattcttcaccccccagtgtatattctcctggtctaacacatgccacagcattccaactcgtcacaggccgtgtctggaggggatgtgcctttggtggtatcaagggtcgtacacaactgcccggtctcgtcgacgactacctcaacggcgagctcaaggtggacgagttcatcactcaccgccaatcattggatggtattaacgccgctttcgatcagatgaaggagggtgactgtgtccgttgcgtcgtcgacatgcaataaggacaatagtttgccaatcgatgaaaaataactgatgtgaaatatgaatttaattatttcttagatttgggtctttttaaacaagagtaagagtacaatatacgggggagcttggaactttgtatggctgaggttgtcatcaaggtcctcaaccccgcggcaccttgagggtgacctactgatgtcagctctatggatttctatatccctagatctgtcaaagaaacaaattgtagggctataatgtcaacaccgtggtaagtaaactgataactgattcaaaccgcataatcatagcataacaaagtcccagcgcatcaggctggcggtcgttgatttttgagaccttcctctctctgtttcttctatttcctctcttcgggtagatctcaaagccttgcaaatacgaaaccgtctcttgacctagatcaaagccgcgggacagagtcaaacatacctaccgcgcggtttatacttctgctagcgagagtcggaaccccaccatgtctgcaccaacgagctatggatgaagacgccaatctcggttctacttcggtataacatagctggtggcctatgataggtggtatattgactgaatatagcgccattcatgtgctgacgagtctaggaggggctgtcttctgttatcagaccctaggcccaaccccgttcgccgcggcgatgcccgcggcgatatctgggaggggtatatagtccacaatatatcagggtgtactgaatcaaactgtttcagtccttctctacattcggtctatcacttctgctttgcctgtcttatactggagaacaagtctcttcaccaccaccactactacaaccatacaaccataccaccacactccaaaacaccgtgcaatccccaaaaatgacagatccaaacccagtcaccctaccagcccccttctccacaatcccccgaacccccctcctgctaggcccctcaccaatccaccccctcccccgcataaccgcggatctcgccaaaaacaacccccacccactcgtaaccatctacgccaaacgcgacgacctaaactccgcgtacgcctacggtggtaacaaaacccgcaaactggagtacctgctggccgacgcccaagcccaaggctgcacgacgccagtctccatcggtggcgtgcagagcaaccacacgcgccaagtggccgcggtagccgcgcgctccgggctcaaagcccgtctcgtgcaggagcactgggtcgactggacggacccgggctacgagagcacgggcaacatccagctgtcgcggctgatgggcgcggatgtgcggctcgacccgtccgggttcggcatcgagcacaagaacaccgcgcaggcggttgtggagcaggcgaaggcggatggggaaaagccttactatatccctgctggtgcgtcggaccacccccttggtggacttgggtttgcgcggtgggcgttcgaggttcggcagcaggaggtggagatgggggttttctttgatacggtgcttgtgtgtgctgtcactgggtcgacttttgctggcatgattgctgggtttaagttgttggagaggttgtatcctggggatgcgaagaggaaggttattgggattgatgcttcggcgacagttgaggcgactcgggcgcaggttttgcgcattgcgaagaatacggctgcgaagattgggcttagtgccgatgatattacggaggatgatgttatccttgatgatcggtaccatgctggtatctacggtattcctgatcgtcagacttgggatgcgattgagtatgcggcgaagatggaggcgtttattactgacccggtctatgaaggcaagagctttgcgggtatgatagatatgatccgtcgtggggagatcaagggtggaaatattttgtatgcgcaccttggtggacagttggccttgaatgcttactccgaccttggtcgggttaatgaatagaccaacgaatcaagagatcaatatgcttaactagagaatgaaaatgttacataaatctacggctttttgaataactaggaagtatagttgtagcattgtagcttgtattatttcaaacgagtgactatagttggcgcgtaaagatgatcaaactagggaagcatggacgacgtcctagaacagcttgtgctcaagggtcatatcggactctggctggagaccaacgcaggcacggaagatgttaatcaaagcggagcgctgcttgcccagggcattgatgacaggggtgccgggaggggtcaggggagccttgagcatgtaactgagaatgctcaggacgctgtggaagcccttgtagtcttcaccctcgctgtcggattgccagctgatacgggtcatcatctcggcgagcacaaccagatcgatgatcaggggcgaagccagaagcgagtcctcacaaatgttgaacaagctgatggtctggtggccacccatgaagatctcagcgtagtactcatccagagcacgcttgttgtcgccgacagcaggcatgtacttgatgacgacagtgtggtcggggtgctcatccttctcatagagaacgtggttggccgcgaccatgtcatccacaacgttggacttggagatctccttagagcggaactgcttctgggagctcaggttcttgccgtcgttgttgcccaagtggttgtagctggcaatggaggtaagcttgataccagcgttgatcaggaagtcaacgagagccgacttcatcttggtctggccagacttgaagtcatcaccgccaatgaaagcacgacgctgctcggccaactgaagggcaccagggacaaaggtgttctggggcgagccgttgatgaacggagtgtcctcgagaatcgcggccacagcaaacacggtggaaggagcaacctccagatgaccggccttgatggagtttatcaggttgtcggcagtgtcgttgacaccgggaatgatgtcggcgtaccgctcagtgttggcagtccacatgataatcaccttatccaagccgttcttagccttgaagtcgcgaatatccttctggatctgctcgacgtgagcccagcaagccttgtcgccctcgatgacattgtcggcacggtcttcctggttggcagcgataaagtcggggtagtagatactaggcagcggcttcatctcggccatctccttgcggacctggttcttgagggtgggctccagcacctgagcacggtccatggactcggcgagattgaggctgctgatatcccaaccgccaatggtcaggtcgttagggtggaccatggggagcaggtcgtggaaggggatgttgatctcctcgccggtcttagcatcagagcccaacttgacagtggagctcatgacgatagaaccgtagtagttggaggtctgcttgccatcgcgggtctcccaggagatattacgacggttggccaagataccagcagttacggtggaaccgttgtttccaccccaaccgaccagcatcatacccaccttgccaaccttgcggttgaccttgaagttgtagttggtggccttgggagtggcaaccaacttgttgtccgcggtgcgggtgatctcagtagtctgataggcgtacttcgacttgatctcgtcttcggtatagacgacattgggggactggacagtaaagagggaagattcttggcgaaccgacccgttcagcgcgccattggcagcatccgagctagcgtgaggggccattgcgttcacagcgggatgaataggcgaattgatagtagtgtgtgtgatagcgtagccttaacggatatagggtgcgcagtccgatgctcctccacggttggatgagcgtcggccgttgaacgggtggtgccgcctgaagaagcagttagcaattgcatttctggatgacgattgcctcctcctagaggcaacagggacactcacgagttaagacttgtcgcgaaaattgtggcggttgtatgtgaccactgtctcgacgagaagtgatctgacctgctgacaaggtttatacgaacctaaggtaaacggacaagaataattgaggatagagagagaagaggaaggggaggaagagagaagaagaggaagtggcatgatggtgactttatgtgtctccgcctgtctccgggaccttgtcccgtcccccggcttccccctttttctttttttccccttttagctccagagcttctcgttggcgattgatcttcttattggttatatctcaccgtctattcgaaagaagtcattgtcaagccgataccgcagtgatggccttttcgatgttcccgactacaacaccacttctttgtcctctaaggtactaaccttctcgggtccatagttacattatgatcagcaacttattcataaatctccagtttttttgtgctgacagctactggggctcccgaggtccgcttccggcctcgggcttctgcctggccgagggatttatttccaaatacgaatttcggtgacgtgattcagtctaggttgtacattttgtgataactgtatttgaattctcaatacaacgcaagcattgcattgcaattgcacttgaggttataacataccggggtatacgtcaggccacgagccctcggctgaaccgtgctgcacatctgcactgcacatcggaggggtcgactccgcggggcagaatagcggtcagccatacgctcaaccttggaacgttgcttggcattggattttgcttcattggaagttttatttttcttgatagctgatcattcacttcatattatatgtggattatcctggactcagaaaggaattgcgcaggatagagagtaaatggttgccgagcacaggttgggagacatagccctgattaacctaggtagacctataaccttacctagaactttaggatattgtcagataaacttacccctttttgtggtcctttggaataattagttattcacatcctacgctgaactttaggcaaacattcctaattgaatgcttaactataggcttctaaatccacaccgcctttgtgctaaactcacatagtagcaagacagcagagcaggtacctacaatttgtatgggtgtccaactttattatctcgaggacggagtacggagtagaatccgccacgataatggatctcgagatgttatcagagccccacagcagcaataccttcgaaatttcaacccgtctacttctatcagcctccctcacaatgaccgtcaaagcttgtgtcacaccaggatgtgccaaaactggcatttgggcctgcgcaggatgtgagccacccaacctaaagcctggcactgcggcagagagtgccagaaggccgacttcaaaggccacaagctcagctgtggtcctacaattccataccactgcttcctgatcagtctaatgcggcctacattgagccattccacctcaactcttaccgaaattggggcctcgaaatgaaggagctcaaggaaaggcttggctggccgcaggctgatgaggctggaaaactctatcccgagaagaacattgatacttggtactactacatgtatcaatcggccggtttcaacctccccaagaacaagcttgccagtcaatgcctgggacgaaccgtgaagggcgatgtagctgtcgtcagatcctcgccggatgatgtcgatggttacgacgagtccttttccaaaatggatttggtaaggaccatcgattactacaagactgcaaactctcgccaggtgttccagcaacgagaacactcgcgacttccgcgcaaaatggggatgccaggggacttttgaaaggggttccccatttcaactcctagggtcaccgaccttagcaatgttgtgtccactgtctggtcgtgtcgcttcccatgtatacttgtatcatttgtctttttgtcttgctaaactgtgttgttgctgctttatgtctccgttgttattgaacgggcgtctcaaaagtcttttactgcgaaaacatattccggccttctttgaaacaaatcttgtctgcagttcatgaagatatccatattgctgttatttctggttgaccaagtattcctgtaaatcccactcccgtttctattacaaaatatcacaaatcgattatgcagggtactgtggtgccctatatgcagcaggtggtttcttggggaccatcatctacattgggctggctgatgtgcttgggcgtcggcgaagtatcatactcacttcagtgacgcaaaatgatcggggctttcctcatggctagttcttttcccctttcccagttggtagtatcacgagttatcctaggtctaggcactggtggtcaactagctactatgcctctgacaatcggaagtattactagctagcacgcgtggtgcccgagtcaccccgttggctggtccggcagggccatgctgcacggaaggtattggcagctctgagggcaaactcgaatgtactatgcatcgatataaaagccagccttcgccaccgttacttgcatggtgaaagcattattatggcatcaagctcatatgaaccgcaaagacgtgacgttttttacatttgggctcgtgagtatatattggcgttgggcaaaatttcctaatactactttcggaaccaggtccttcgcaaaatacttatgtaggtacttatggagttataaattagccctattttcgataagatctcgagaagtgtcactgtcgatattgtggcaccgaattaaatccccgcagtggggaacttccccgaagttgtgaaaaaattcaacatctccatcatgcccggtgcgaagaacacccaatgctggtaagccgcctaaatgaccatagcgctttggagacttgacactgacaatatttagcgatccatgtcgtgtacttcatcataaatgtgatactaccatcccacccccgggaaccagctctctaactgtcataggcgacggcatcttgccgcaatgcagccgatgcattcgcacaggtcgggaatgcgctcgaagtaaaaaagagacgaagttccgacaggcaaagggtcggacaacgcgtactaagtttcctagcaaccaagtttggcttcggccaccacctagaggttagattccatccgatttccttgagatctagtctgacattcgaccgttatttagttgactttgtactagaaaacggaagtggccaggtggataactcgactcaaacgacgctaaatgtgctgtcacctgggaatttgcatagtcatgctgactctattcctaaaccggaaaggctgtctcccgggtcctcatataccgcccctttgccgcaacatgattccccaaactatgaagtatatacgaggagtagtgctatctcgccaacactgcaggtggtgagcacacccgaacgatcacaccggcggccatggcccttgagagatcccgaggaagcgcggctgttgcggcattttgttgaaaaggttgcaccgttcgtaagtgatgatattttgttctgtatggtgagcggcattctgactataatatcaagtttgattgcacggatcgccagcagcattttgccatccatatcccttaccgagcacgccgttgcgagacgttatttaatgcaatattggccatgtcagctcgtcatttgaatcgcacaacagggtttgacccttttgtgtcggataattactatcaagcatgcctggagaagttaattcccgcgctggatgaccacggtgttacgatggatgatgatttattggctgctactgtaatcctacgcttgctggaagagtttgatggtgggtagtggatcccttcgcacatgtgtcaagaagccagttaacgatgatcatagtaccactcgcggggtccgatattcgaggccactccttcgggacaaaggctttcatacggtgtccatcaatgatgactacaaccccgagtctccggcaggctgtctactggagtggcctacgccaggagatatacaattcccttagcctccatcaggccccagacattgattcgaggtcctttgatttgaatttccactctaactcgctgggctctgatgcaggtgattgcgcatgggcgaatcaagcaatcactcattgtgcccacgttctggtattttgttttgggaagggacctcgctcagcggctgtgcatgcagagcttacggcacataatcagcaatggagtgagactcgaccgaactctttcgacccctatttcgtgggtgaagatgtggtggtgggaactgaattccccgatattcgttacagttgtccctggcacggtacgtatcggcgatatatcttggaaaccgttcgagatatgaaccgaggctgatcgcttgtgatgatagcaatcggcaatcaatatatcgatcttgcccagattctgctttctgtgcatgacccaactctgccaacagttggacctctgcgcagaggcctgatacaggaggctgatgtaagtgtcccagtaacccgtggaccttccaatctactttcaatactcaagcggagactgacaggtggttcaggatcatatccgtaggggggtttggacattatgtggcgcttcattatccaatgcctctgtacccccagccatggttgtcggttgtatggccatccatctctgtaagcatccgaaactattttcaacatcttctagtaagtataaacgaggctgaccaatatcacaggcggcgatcgtttcacggacccacatgaacaggaccacttgatccaggttcttatccaaacggatacacttcatggttggccaacccatgccctccagggacagctttgggacacctggggcaagcgatgaaagcgagataggcgctagtgtaggtacgctaagctacatatatgtacatgttgttatggttcctattaaaatacccgggcttggcgcgttaattcttgcaactacctaaatggtagcagcgtaaccaacaaggtacgtatgttgtatgttgtatgaaatatggaatacgtatttctacttttggccaagttcagggtcttgcatgatccgtggcgttgagtgggaagtagtggccagtaataggagcgggctcggatggaagaaaaaagggccccgcggatcgccgaaaaccacaaattgattcttttccttgccgtcttctaggaatatcccgacaacctttggaatatcgccacataatcccatcaggcctgtctgccagaaggaagtctgatattgcactgtttgtgtcgaaatccattcaaaattgcagatcgagagataacccgccgatcgaatgattgcaagtctcaaacattcacccgggaaatgtgattggtgctagtggaggatcagacactaggtacggaccagtcgcattgcaagctgtgtctctttttccgtgatgtgcgtatgttccctgtgcacgcatttccttgggctccactggcggtttgggagaatggatggatttagtgatgttagtggatatagtggtatagagacacttcaagggctattattacaacaacgcactcggtatatctgtaaatagaataggcaatatggcactcatatcgcacaatatctcatatcagtatcttataataacctcagtactccgtaactcccaatgtaacccctgaagacagttacgcaccccctttccgcactggagacgctaactagactagcgtgttttccgggtctggcacaaagcgcagtcccccatacaatcacaatcgctaattctccttgagatctcaacttcagcttttcttcggacttgctctagaatagtcttccccatatctcgaggggatatggcccactgaattcgatgttcacgatctttgatggcttcaatgaacatgggcatgttgcccaccatcaaatgctccaattgtgggtgcaacgtcgagatctcctctatgggggatcatacctgcattcgaaatgagttcggtaggctttgaatatccaatatggccccggggaagtctacatgctgacttttgctccagttgcacctatcccatcaccgccttcatcggcaggattcgaatcggaccgtttcatagaggcaaaggttggccgagggaggccgccggctatagactcctccgctgcaagtatgtctcaaatcgccatgtggaaagctggagggattcccgactgacccttacatatagatcgagcattcttgcagcccagtatgccgacaccagttaacaatctccatctaccacctctccctgccagtccagtacctccatctacggtgcgcccgtatcagcacagtctgaccgatgattcggtcttctcattccccatgcctggaaacagatcgccgactgaagtgaggacaccgagtccaatgacggatcggactgcgcctaaaccacggccaccactttcgtcgcagggacaagggctgagcttgatgccagagaatataaaacttccacctagtccaatgccacctatgtccccggataagaaccatcgcagggaggagtcggcggtgagcaacagcagctatcggacctctttggctagcagtcgctacggcggttctacaacgagatcatcatccaacagcctttcgcgtggtttccggtcgtttatggacgataccccaccgatgccactggcacctctccgcacccccaatcaatcctctttctcccgtgattccaacctctcggcgggatcccggattagcaaggaagaagccagtggattcgactttggtattccagaagcccaaagcccgattaccggactagatgatctcccggaggaacctccttcgtccaaattccaggataataccaaatatgtcgctttcaatcctgcgaacctccaccctgcggcagcgacgacagagctaggtaacgatgcaccaaggaaaagctctaacgcgagtacgacgagtgcattttccgtcactagtttcgctcgagctctcggtctggaagagcaaatgaatcactctgaaagctctggctccgattcatctccttccgatgcccgcagtggtagttccatgtccagtgttccttccgatgtcagcttgaaccgacacaaaccctccgatccgctaaatctgtcacccttggttgaagaactgcccgctcggacccgagagactgttctagaaatacctggcagtataccgagcaccatgggcgatgtccctcttattccggctgctttcttcagcccggattcacccaccgacccttcaatcaaccgagatggcttgtcgttgattgcagagaggaaacatgtgcctccgacttcgctcccagcacaacccaagcaatcgatcccccggaagccaccagcacaacgctcatttacagcacccgtaccacaagcacagccacaaacgccaccgacacccacccggtccgtgacacgttcgaagggaaagtgtaaaggctgcaatgagataatcacaggaaaatcgatatcatcctcggacggacgtctcacaggtcgataccatcgtggctgtttcgtttgctttgagtgccactctcctttccaaacggtcgatttctacgtcctcaacaatcgacccttctgcgcgcagcactaccacgagcgcaacgggtccctttgcgccggttgtcacaccggcatcgagggtcactacttggagaccgtcgagcggaaccctgcacggtctgatcgccgtcgattccacacccagtgcttgcagtgtcgtacatgtcatatccttctcaagggcgactacttcgagtggaatggcgaagtcttctgcgaaagagatgctcgccgagccgctgctgcctcccacccgccaccccctggtcctcctggtcctcctggtcgtctccgccccacactacctccatctcccctggcccagtacccaccaggcccataccatacgcctggtggaagacacggacctggatatgggcctgggcctgggcccggactccaccccggtgccccattcccccctggtggtggaggacgattccccgaacgacggactactaagcttatgatgacttgagcaaaccgtgcttgtcattcttctttcttgtgaaatcttgcaaaacgctgagttgcacattccttttttccgcatatctaccgcggtttgtattccactttcttcattcctttatatatcgcgatataccctctgtgctatctcgcccatttggctttcgctggcaatggtgttggtcgtttgttttcccctctacatcagggctatcctacatctgcatccatcgaaaatgccccattggcatgttttgtgatttttgggccatcattcgcggtggtgtatttgttgattcttcatgccgaaatgtttctaatgtactctctatcggctcggtgtttggttggcggattatctcttgtacatgatttacaactagaatatgaggacctgtgagattgatgccgaaaatgaccgcttttgaggccagaaacggctgcatttccacccgtaactttagacgtgcagcggccctcaaccgacccttttttgcccgcccgcaatacggtgatctctcgcctttatggcatttctgtgctttacgggcgactaagtgtgccatcggaacatgactctcattgaatggagggcatgggtatatgtggatgtgaccgagagcggcggcttccgagtccgacggggaccacaggaagtctgtggtcggcggtagtattcggaccgtctaagaaaccttacctatattgagcgagtggttgtatccatcctggttgccagcgatcacacgttgaaggtctattcttcctgctaactgcggtcttaacgctgcgggatagataatcatccaaccaattgagatgaaataatgatttgtctacgtcattttgaatactctgcggcgaattagacgcatcatgcagctcctcgggggatattgaaatagttgtagtttccagggcatgcgtgaaggcgtgcaatgagagggataggaaggcgaggtagaatcccacgcttttgcttctattggactgggacatgatgaactcccgatggttccatatgaaggaggctaggaaaccagaaacaaaaggagggcgtgctggttatacaagtatggatccataacaaagaacggcttccgcccccaatgtacggagtgactgcagaaaaatgggggctgactacggccaactcaatgttggaaccgactctctccatcataccatctttctaccaccgctttcctgcacttcggccaactccaaaatgaacgctatagactctgaaagatttttctggggcgctccaacttcgaacgctaagtcagtataccatcttgcgcattctttatttgctgacctcgacaaagcttctgtgagacggactacgccgtgagcagatacatcgccgagtttgtcaacagcttgacgaatgtcgtctacagtaagatactggaaagaatgtgaaattctgatctaactgatcttcatcggtaatctacggcatctacgggctacgctacctacgacggaaagcgaacaagtatggtgattctttactgaatccacgcaaatctagtctatggagtacttttcgagccaatgcttgcgtttgatgtgtgatctgccaatcggattgcggaatgtgcccggcaagtgggtctcccagctggcataatgggctgatgtgcggtcaatagttcggtgggtgtgggggaagagcagggaagacgggtcttttatatcgggagtattgaagggaggctacgagacggcgtattgatgcgctaaaccctcggaggcaaaactaactcgaaaaggcaattcacagggccgccgtttacaagtttaatggacgtaagacataatgtgtgttctaagtttgatcaaataacctaaatccatgcctcattatatcgtaaacattgatataccattgcaatcatttcgacttgtgattctcaagctctagtggctcaaccggatagaggtacacacgcttcatgatccagccgaagcaaatgacataaagcgccaccgcgatgatctccatacgttgtctcacagtgatgcggtctaaactgggatttggaacacccaatacacccgaatgttccttctcccacccatcgcagacctggcggaatcgaccgggctcgtcggagatgacgccgtcgatctcgtgtcggatacaccaacgcattaggttcggcgaattcaccgtccagacatagactttacgccgggctgcgcgcgcctcatccaaaaacccccgtcctagtgggcccatcaggatcttctggttgatgttgaaggatataaggggtacttgtaggaattggcgagcatagctcacgtcgacgcagattagtgtcactgcacacagtggcaagtgctttgctcgtgcggggaggtatcgtgaagaccagaagccgagaacgattcgtcgctgccagtcggggccgcccgcgggtgtagggactgactcgatggttttggcaatcagttccattatggcgaagggttcattggcgagctgagaagttgattatgttaatgaatgatgatgtgcgaatcggggagaaccacctacctttatgtctagcaacatccagaaattctcccgacctggttgtcttaggtattctaacacatcggccaaccggggcatcggttcatggggagcttgtatagttcgcagagtttttaaatactcccagtcgcactcgctgaccttcttcttaataccgtagcagcgcatgaggcttgcatccttggatcgatgagcgtagttctagatcgggtgtatgcacctacgtgtgataacaccacgattccatcgcgggaaatatgaaggtcaagctcgagggcttgagctcctgcccgaatggcgccatcgattgacaatatagtgttctcgggatattggcccttgaatccccgatgggcgatggcttgaggcaaacgcgggcaggcgtgggcaaccggtgatcggtggaaatgagcttgcgaggacgagttaacttgataacaccgacacggagagttacacacctggaatttcatgcaaatgatcttgcgaaactatagacgatgggtcgcccattttgaaaagagttgtgagtgttgaagaagagatgccatcggagtttggcggagatagaccccgctgcacggtctaatgtggactcaggtgctcacagttgctttccagactttctattctcgtgcggaaagaggccaaaagatcgggatcagcacttaaagatctctgtctggtcttcaaccgccaggaagaaagcagccctggagctttagagaggaggctggtcgaacaccccgattactcatcactagtgaggtggatccgtctccaatttccccatgttgatttatagcctccatttcccaagttgttgtgctcattaaattgcatctgttctgcgactaagctggtagacaatggccgttcagcaatggatcacgcccttgaagggaattgacagccttagccggaccgaagctcccgttcccgtaccagggccgagcgaagtcttggtagagatccgtgctgtctctctgaactaccgcgacgtggaaggtaagtcgcccaccaagaataaacatgtaggacatatgctgaaaaagtctttcaaagtgaccaacggcgagtataagcatcacagaacagccaaccaggatgccaccatcgtaccctgctcggacatgtgtggggtagtgacacaggttggatctggcgtgagcaagtggacagtcggcgaccgggtgctttcgactttcctgccagatcatcaaactggccaggtgactgagaaggagcttgccaggagcctggggctgccgcagaatggtgtccttgcaactcaccgcgtgttccctgattacggcctggtgaaagcgcctagcttcatgtcagatgaggaggcggctactcttcccatcgcttcagtcacagcatggatgtctataaatggtttgcgaccgatggggcagagcggcgggaaggatgaatatattttactccagggaaccggtggtgtggctattgccggactacagattgcgaaggccgctggcgcgaagggtgggcaatcggattattaccgcttataagacctaatcgctgatcttgcaaacagttattatcacctcctcgtctgatgctaaattggagcaggctaaagagctaggcgccgattttaccatcaactaccgcaccaaccccaactgggaaatcgaagtgatgaaggtgactgagaaccacggtgctgatatcatcttggaagttggtggcgctaaaaccttgcggaagagctttgattgcatcgcttttggggggttgatcgactgcattggctatgtctcaggcaagatagatgccgatgaggaccgcttgaacgtcaatctgctggctcttcgtcggacggtcaccctcaaaggaattatcaacggcccgaaggatcggtttgaagagatgatacggttctacgaagaaaatcagattcacccagtagttaaccgggtcttttcatttgccgattccaaggaagcattcagatttctggaaagcgggagccactttggtaaggtagttatcaaagttcaatagagccctagggctctaatggtgtcgaatctcattgtcgaattatcattcactcctgattgccacttggcttcattatcccagcgccaattcccagatcttctcccatttccttcccagccaccgtcaatttcttgcaatcctgcagcacgaacaggagacgggcccattctgtcccgctggtattgcgccatccatgcatcgtagcccgctgcacagcaacatctcctctgttcatgatgactggctcgctatcttccaaaatcatttcaacctgcccctcgagtaccacgccgtagtcgaggctctgcgtccggtgaacgacagcagggttgttgggcgcgaagtccacaatgcggcatacggttccaccagggttaacgagtcccagctggccggattgtgtcaatgtctcgtgggtcttgatgtccgcgtcgttgttgagatccggagggaattggctcgtataaacaacattgaatgccatcttgcctttttcaagtgatacccattcagccggtgtcgacgaatgtatcactgccttcccgttctcgttgtgacctgtgatatgccgagtgactacccgcaaaggcgacacttcactgggattggaagccattgtttataggacacgaagtggaaatggaggtatgaagctgttgaaatcaatcaatgtgcggaatacaatgtgtgccctcggatgattatatagtctcactccacgtgacacggggcggtgcatgtcagcttgaacagcggtgagctggatggaaccgcaatggcttacgagtatccttggttggatgtgggcgtgttcgaaagcgaccatcacgtcagacctgattagaagattgtcggttcggttgccactttcggcgctgactgcgatcccgtagctcagatcgggcgcacaaaagaaaaatccaagagacaaatgttgcagacgagttcaactacatcgatataagccaggaaccctcccgggggagcttcaggattcttttttaccttggtccacaggtaggactaccagcaccaccctaattcgcacgcgaggcccatatccatggctgggtatttagaggattgtgatgattccaagggagtaccccttgcttttggaggttcgatttctctatgccgactctttgccgactctgacacacattcggccgacgaagaatccctcgatgatatgtccaacgcgcatttcgtcgagtcgtgcacatatagacaatcaccaggcagtctggctttgcagttaagcatgcctcggtttgaccgtaacctcagcaactgcatagaagcataaacgcctcgtactcgagatggcgacaccacgctcgttccagcgcgctgctcgtgatcccaccaggtaccaccatcagcagagcgccggcatgccgaggaatgcctcgcaatgcttatattaaggagtcggttccgatttgagcggtggagagtttatgtgaaccaatagcttgatgcaatctaatctaacacgagaaaaatagtgagttgatacaccagagttggggggcgtgggggtgtgggggttcttggacgacggaggttatagttatcttggaatcagatatggatggatgtaggtaaccctaatatgaagttagactgtatgtgtcagcgagattaggaacatgaggcttatggacagatgtatattcatttcgcctaactagatatagatgtgatgtttcaaccttgcttttacaaaaaccatcggaactcagcagatgcaggcccatctctcattcgctccgttggaatatcccgtgcccggatcgtggttccatcacgacggtcacgtcgcttgttatctagccacatgtagagtgccagagaagccgtcaagaaagcgccagtagcaccgaatgcaccaacactgattagtgcgggagtatacttaggcgcatcctgcttccggaacaagttgctgctcactaagcccatcaagttggccaatggcacgccgatactcgtcaacagtacacggcgaccctcgtgggcgatgttgttattataccaggtgctgagaatcacagatggggcggacgttccccaggtcatcatgaaggttgcgaagtaagcgacgtggatgtttgctgggacatcgtcaatggatgcgtagatcatgaacccggagaaagtgagcaggaagcccagaacaatgaatggcgatcggagtctggtccagtcagaggagaaaccgagcactagcaacatcactgctcctgtcacattgggtgcaacggtgtacaggttggttttgacggtgggaaaacccaatcccgcgatgatctgcggcatgaagagcgcgacaccctgcaaaggcacaccgagacagatttcaatgcacaagaaggcgtatgtagtggggctcttgaagataccgagggcctcgcggaagctaaactcctcgttgaccaccgcactggagtcgacttgaattcggtggaaagctagcgccttctcctcctcggacaaaaactttgcctcggcggcgctccgtgggagatagaagaaggcaaatgcagcgaagagaacagtgacgccgccctcaatgataaacaaatagcgccaattggggatatgggatcccttgatctggaatactccaaacgcaataagtccggagaaagcgtttgcaatgttcgacgcagcgtagaaaacagccaggcgacgagccagctcaccacgacggtagaatgtggtcaagtaatagatcaccagcgggaagaatgcagcctcggacatgcccaggaaccagcgcaaggcgaacatgccactgaaattataggtggccgaagagagcaccgtgagcgaaccgaatgaaaacatcaagattggaaggacgcgggctggactgaacttctttccaagcatcgagaatggcggcgcaaagatcacgaacggaacaaaaaagatggataacaggagattgtactgattcggcttgaagtgcagatctaaagattcgattagactcaagttgctgccacttaggtccaggatctcacatacccgtgctcattccatccgtttccgcatttcccagatttcccttgtcgagggcgttgaatagatctgtcgctggtcagtttctgcatgaatgacaagattggggtcgacttacacatgattgctaggatagggagaaggcgatagtcaaacttccgacagagacgccgttcagccttgtggtcgacgactcgggtcacctcttccatcacacccgggaccgagccatagtttttcaacgtgttgggctcctcgatagtggccatggtttctgttttcttcgctgtgccatcaggcgacgatgcgcgtgctgggctcgacatactgtatccaaggtgttatagacgaagaagcgtagaaaggccaagtcagcgcaccgcctgtcagttataaaggtccagaatccaagcttcttatcaaaggagaggtggcatcccttgttctctctgagataggaagacttcgggaatgttgcacccacgcataaaggacacccccacgtttctccgcatcatggaagctttagctgaacaggcaaagatcgcctgagatagtcgcatttaggccgttggggtgcttatagtcttatctgcgggggaaaatgtaagtacatcccgcgagcttgatttgaattctataccgataagtttatgttcgtatcgccgataaagtatgcccctttctctcccttgctatcctacgaagatccgtatctcaccgatttattcccgtttctcaatctcctagacatttcttcgcataagagatatcccaattccggtgtatcaggtacagttacatccgtcgcatgacctcaccacatcgagccacgcttttggaataagacagcgaattggagtagaaaatactccaaaaaaaaacgttattcttgatcagggacctaaactttattaaaacttccatggctttctcggaggcaacattagcatattcccggaaacgggacggcgtaattatcctagcatagccaattatatattgagagccaattcgaatcacttcctgattactcttaagttaagcaattggaactgtgtggcgcattccaagtctcatgcagggccttgcacgtgaatgttatcgcagccttggcggggatagtcaggacagataacaggtacaacttgtacggagtacttctacatcgactgtccacttgaaacatttagttattcttcaggatactgacattacctaatttatccaagatcccggtaagaaagctgagaaagaagctgcatttaaccactcccccgcaatctgtctttgcggagatacagcggggaaatagaggagtcaatgtcgaaaagaatgtacccacattatccggacaaaatcttttgatgattcattataaggtgagattaaggttgtatttgaaatctaggaaaaggtgacccttgtaccagttgactacctaccaccgactatgtttcaactcatatatatatttataatctccctgcgtgctcacttagtatcttcctaccctttactagcccgaggaaaccatgatggcaagaatttccactgggtgaatatatggactgctatgccgcagttggtcgagcccactaatctacctcctgttccatttgtacgttggatattcatcatggtaatgggatcaagtaaggcaaggtctctatactgatagtggcgtgcagaatggatccaccgctgtattcaataatactaccattcgccaaaccctccaggtttcattagcagcacaggaaatccgtattcgtctctctaatgtattcgggccaaacgatctcaagatttccaatgcgactatcagcctacctgcaagacaccaggtgggaatcagagctctacagacagatacattgaagaccgtgttcttcgatggaagcccagatgtggatatcccgaacggtgggctcgttgtgtctgacccaataaagttccctgtcgaggcccaatcggctctcatggtcaacatatatctcgcagagggacagcaaggcttctccattactggccaccctggaagtagaacgacctcatacctggctttgggggactggactagcgcagagaacctcacagactcatctgttcaaagcacagatcattggtgagtctttatcccgcaaaccttacaattatcccagatccgaatctgtatctgacctctatcggatggtaggtactttatcagtggagtggaggcttgtctaccctttgagtctagtggcttcgtgatcatcggtgacagtatcaccgatgggcgaggaagcactacaaatggcaatgatcggtgagtggactgttccacggtctattcttatggcttatggatttaagttggccggatctattgctggcaagaatgcaaaaacataaacccacgtcaaatatcgccattctcaaccaggccgccggtggcaatcgtatcatacaagatggtctaggtccaaacgtgatcagccgtcttgaccgggacgtcctagcacaatctggagtgcaatatgcgatgatcttcgaaggcgtcaatgatattggcgtagctgatagtgatgcagctacgcaggcggatatcgagaagaaacttgttgcggcatataaacagatcgtgacacgggttcatgcactagggattccggtatttggtgctactattacgccattcggctcgtcgaggagctccgagtatgtacagctttactcaagtgctgagcgggagaggactcgtcaacgaatcaataaattcatccgggaaagtggcatattctatgcggtactagactttgaccaggtgttgagggatccgtacgcgccatctcagttgctggaaaaatatgattcaggagaccatcttcatcctaatgtggctggatatcaagcattggcagattttttccctctcagggtatttgaatgaaattcacatagttattctcgaatagtgggacaaaagcaatctcgagactattgtccacatatgcaaatataggtatatagttttcggaccaacagatgaaaggttcaaacttttcgctcgaaaaacagagtttctttaaacacgacgtctgaagttgtcttgaaggttgcgctttctgtaagcgccgccaccgacaagagcctgcttgcggccagggccaaagtccggaacaccgccgagagaaccgaagatatcaccgacgtagttatttgccttgataccagccgcgaaagtagtattccacccgtccagaataccctcgacaaccttgataccagcaacatagaggttcttaatagcaggctcaaatgcgccctgcgctgacgactggaagaggttataggtcgccgaagaaccgggataggggcgatcaaagtccgacgcagtgcgcatcacgataatgcgagagaaatcggtcagcttgtgcatcgaggatcggagcaagacttcgaatgtagcgttatcctcctgcgcggttgtgcaatagtcgcccgttccattagtcaacaccttggtggtattctcgaacaccgatccgaggatattgccgctgaagtacacatcggaggtcgcgacatcacattcaacaacactaggagatagggtggcagccttgtacttcccactaggggtcttgtagtgggagcggtatgcctgagcagtggcagagtcggagaggtttgccgtgcgcgcaaaattagcggcaattgtgcgtaggtcagcgttcacctcgaagacctctgtaccgtagatgctggtcggatactggcctgggaattcggtaccttgcgcaacatacccggtggaaaagttgctaggaagttcgcggatatcaatttcatactgcagcgcgacctggactgcgtaccgagcaaaggctgcggatccagtggtagctctcttaggattgacgccagcaatgcccgcgacaaagaagtaggtttgcgtgagatcaaagagaggggagaaagcaacagatgtgacagtcgcagcagcattgatctcgccttctcccgtgatgagttggcaaacatcatagtcctcggtacagaagacgtccgggaacagtggtgagagaccgggaatggtgatattgtgggaaagcaggtcgaattcggggatgttccaccaagcttcagcttcaggtgcaaactgtcgtaatctattagcgacattgcatttattttggtggaagcgcataccattgacacgataaacaccttcggggcaattgctccacggtgaccctgctgggcggtcccagtagctccggcgcataatgagctgccagcgagcagaaatgaggccgtcagagtctgaagaaggtgcatggtgaggggagttgaagatggaactctgttcttgaacaagccgaggccttttatttgtagctccgtagagctgtgaagatttggtacggaatagcccttgcgtctttcgcgctaaggatggaacattgccgatcagtggacatattggtacctgattcggagaagatccgcaccgaaacgtggagcagcttgccccaaaaacgccggagattctcctatcgccctttctgacagaattctattcgtccgaggtagatggagaacacaagccattgatacctggtttttgactggccctttgaagttgaatgtgggtcgacagtgatagggtttcacctattattttgatgactgttgcttttcaagcatcggagcttgccggtgaacgttggaagagattcagaaaaagaacgagctcgatggtttcacagttctttaagatccttgttgtggagcgttgccgagggatacttggtactcgcgttgtaccagttgacccgaatgactgctcattgtcattctgctcgaaatatcgtgtctatcgaactcaaaatctatgccgtatccgggatccatctggtcgaaggcctgcctgctccgtgttagacgatgaaaggaaactgaatggaggatgagcttacctttccggagacttgtttactacgaaatacatttcacaaaaaatagaacactcgtagatcaggcgaataaggagcattagatagatgaaacgcaagccaattccctgaagtataagtccacagagggtacatgaccaattgcaatcaatttgaacaaatcgtagtgaactacctgctgctcaatcattcagacttccaccaccatttcatgacatcgccaaacacccttgctcgtacgagccacatgatgattgaaggaaatgtcgaggacagaagaccacaagcaatcgtgtgcaaattgcggttatacctgaaagccagcataagaaaatgaagtcaaagtcaactttcccgagtccgatacgacctcaatatcctccgcatcttgattcgggtagattagggccgacaacgctgcaacaccaccgttcacaaacgtctcaaccgagttccaatcgacgtaaattgtaagctggaccgtgtccccacctgcaggatttgtcgcagtccgtgtcacgtcccaagtctgtttggcatccgatgtcaaaacatccgaagcggagccgtcagagtccctaaccaggaagagctgggaattggcgaagtcgtaaccaactgttgtgttgtaggttccatcggacttgatccggaagtaaaccgtgttgccatcatcaccatcggccttagacaccgttgcttgaataacatatgcacccccagcgagatcagcaggaagcgatgccgttgccgggtctgttgttatttcagtcccatcagcggagacagggccagcaaataagtctgcatagcctgagactggaaggctgactaacatgggagtcccattgattgtctgatacttgatctcccgcgctaaactttgctggccctcgaagtctccgtagtagggcagataggaagcataattccagctattcatccagccaatagcatagcggcttccaaatttgtcgtctggattttcccagctgacagtggcgtagaagtccggaccttcatctaaccactgtggaacgctggtcgtgggtgtaaaattggtgccatcccatgttccagaccaataggcggtacctgttgtctttccataattgtacccattcgcaccgacagcgaggacccagccacgtgccgctgcgtcgccgtcaaggttgagctggaataaatctgggcactcaagagtacccaagtcgacaccagaggccactggagaaaaggtcgagacgaatgtccaagtcttgaggtccactgatgtatagaaaccaatataggttccttctgccatcacagtaacccactgttctgtgtcgtcgtcccagaagattttgggatctcgaaaggctggtttattgtctgcgtccgggttgggcatcacgggatttccctcgaatgaagtaaacgtgtatcccatgtcggtggaataaaatagcgactgctgctgaacaccgtctcccatctgagtaaggatagcaacaacagcattctcaccgaagccggccgtgttgttcacatcaaccacagagcttccagtttcaatgtcgcctagatccacgtcgctgacagagttgggttgatacttctgaatagccacaccctgatgagtccattgcaccatatcggggcttgtcatatggtaccattctgtcccacccgtgccggggtcggagcttatccaatcggaattccagaggtaatagagatgccattcatcccccacgtaaattgggcgttgggggtcattcatccattttgtttccggtgtgatgtggtagcttggtcgcgtctggccggaggcggaaggaaccattgcggctagcagtatagatgatgctagaaaaaggcgaggcagcagcctcttcgctgcagtgggagaactcattgcgatatgagcaaaaaaaaggttattgaaaggaagatctattggccggaatgccaaagatgacctagatagaagtttaggaacattcttgaagatatatatactatccctactatcctcctgtccttaggaatgatatctccttgcataaaacaaatgcctgaacgatcattccattgcaggagactagtggattcagtgaagtcaggtggagtcgagtggagtcaaaccgcccgtcccgcacgagtttatcggaatttcgctcagccctttttgtatttgacattggcttcttcgaaagagtttgtggttgtgccgtggtatacgccacgtggtatacaattgagttgtgccgaggctggattatatgaagtctgcttatacgaagtactatttctcaaactccgtagtactaccactgaaacaccctagtgtcccatattgtcggaggatagctgaacttggtctaaccaaatacatagtcgtattccgcatcactccgacctattcccccctgctcatgcaatcctgccaaaaccagccactgggtccactacaatatacgaactcgcagtaaaaaagaatatctgaattcagcaactagacacatgtgaaagtactgaaccccgcagctgtgaccaaaggggccaacatctcatcccgcaggtaatttacgcacccgtgatccatttcatcacatggaagtttcaacctatcattattatatggaagaagaatccggtctggggttggggagatccgtggacgagcgaagacattggttacgactcaaactcaaacgccataaggcgcactcttgaagcctcgatctctactctagtgctttagtatttgtgctttcactatataaaggatccgctaataatatgccgattggttctggaacaaacaaccacaaagttagttctccgccaagactgccagtgcaatatatcgctctacactatgttgtatatttcatttggcgccaggggctctgagttcacaaaaaatgctctgatgcttgcggtataaactcatatggttcttgccaagtagcccctgaaatacaccgtatgacccatgggctcaagtggacacttggtgtttgacagattctcataatgtatgttgtagtatagcattctttactaccggtgtttatcacgactcatagccacagttatatctatgtgcatttagtgccttctttctcatctcggccatgttgcggtatagagccagcgaatgggccctgctcgtcctcgttcctaagaagacataagcgatccagctagtccccaccgtggtcgacacgacaggtcccggcgccggataaatctcggctctggtgacatgaggtagcattttaggcagtactccgtactttgaaaagagatcctcgcccacgcgacactgccctacccgacactgccctatcagtggagacgcccgacacaaagcccagcttgccaagtggagatcgtcgacctgttctggagctagcgtttgagatttgaaccgtctcggaaaattgtcggaaagcgtggcgccgctggcgtcggcaaagcggggaaagttgtctacgtacctagaggaagaggatttggccctcccacatgacgaagtttgcgtcaacctcgggcctgtcgatgtaccctgctataccaggttctccttctcctcactcagcatacgcatcgccgcgcctatgctggtgtcatcaatgactctttttcgacacctttagtgttcatgccctgacacagcttaacaactagcgggcactggagtgcttagagagtctcagcacaaacacgattgtcgagggtcttctctttctaaggcgacagcttgaataaggtttcttaagcaaactcgcacatcctgctttatggccccggtcggagcgttcagcaggtcagcaagcgcggtggccacaaacctcttcaccaagggagcctcagtgcagctcgagcaaaggctctctgggtaggtggctgggacaggaataattcggctccaactagactgcgaaatgacgctatcgacatacttggggtgctgcattcgaatcaggagaatgtcccggctggatacgtataatcgtctcatctcgatatcggcctcaaccttcgtcgaccaaaacgggtgacatagctatgcgtggcacaatcgcgttagggccgttccagagatgttgagcgattcatcggggtttgtagtgagagacgggctaagccgcagattgacgcagtgataatagaccagagcatgccctcggcgcaggcattatcctccctagggatagatagatagtggaatctatcacatctcttttttcttttgctttttgctttttgttctttttttggttttttacgcctctcctcctaggtccacgaccacatctctgatgaatggaaaacatggagtcggtccaaattctgaccatatcctcctcaatatcctccctccagggtacagcactaagcccgatcatgggctcatcaggtgaatgactatatatgactttggctgatgggaactccatccgacgccgttcaactcatcccccgtttccggtgactagcgcaagatccctcctgctttttagcgccattccgtgatttatcattaattggcgtgcctgtctagtaatttcccccgcgcattggtcctttgattgctcagcagcaccgtgttgtgctgctcgcacgcccgcgtcttattactttcgaatgtgcctccgttgtccgttgctaacttcgtcttgccttgattctcattgcaagctattggctagaacatttgcagtagtcgactcattgtcggacccattggctcgggcaagtctacactttgcaaggcgatactcggagagattccttttcaccagggtgaaataacgctgcgcacaagggctttgtacgtcggattttgcgatcaaactacctttctattaatggaactaccaaggaaaacattataggcctctcttcggtaaacgaggaccgatatgctgaggtagttgaggcaacagctctcgcctttgactttaaaaccctaccacaaggagatgagacaaacgtgggttccgatggtatatccctatccggaggccagaggcagcgaatttccctagcacgcgccctatacctacaagccaacttacttattctcgacgacgtctttagcggcttggatgcggacaccgaagaacaagacttccgcaaagtcttttcacctgaagaactgttgaaacgccgtcaagccaccgttttgctctacacacacagcgttcggcacctacaggcggaagactacgtcattacccttggaaatggtagcgttagtgagcaaggcacatttgacgcactgatagctggtgatggctacgtccaccgtctggggttgaatggcttgtccgaaagcgagacaacgtctgaggaattgatcatcgaaaacaatgtacaagaatatttgtcgccagtggataagataaaacgggccaagcttgccgttgcccccaatttggatgcgtcccggcaagttggagatggcactgtctacaagcagtacatgaagagcatgggatggctgctcgcagggtctgcagttttctttgcttttctcaggggcttcttcttacatttctccaccatctgtaagtactacacgtctttgaatacggaatttattctagagaggggttcttggaagctaaccgtacagggctcacgtactgggtcgaggacgcacaatcgcaacgcccaaaacaccattccgcttactgggccggaatattcgcgctgtttcagatcggtgtcttgatctcgctcttcctacttggcgctcccatttggattgtctctatcaaacgcgctggcgcaaacctacacatggatatcttgaatacgctggtctgagcaccactcagtttctccactaaaactgaaattggtgtcacaacaaacttgttttcgcaagatttgaatctcattgacacggagctgccggatgctacggtcagcacgcttttttcggtaggccaccgcataacgaaccattcaggagacctgagtccaacagctaacatatggatagatcacccaagttgtcgggcaaatggctgttatgctgacggtgtctccctacttggccatcactttacccttcctcgccgccctgctgtacgtgctacaaaagttttacctgcgcacttcaaggcaacttcgattgctcgatctggaagccaagagcccactatagtaagtgaattagagaatatcgtcatgtatcttcactgccgttactgacacacgtttagcacgcactttcttgatactgttagaggcatcacaactttgcgggcattcggtaggtaccagttacccaacttcctgcttgtccgtttgatttacggtctctaatccaacgcacataggctttgtccgcgaagatatccaaaagaatgcctgttttctcacctcgagccagcgaccttcgtatctccttctcatgatacaggaatggctgaatgtcgtactcgatgtggtagtcatgctgttggcagtagggttgacaacggttgccgtgcgcttccattccaactctgctctcactggtgctgctctatacagtcttttgagctttggagagaacctcgctggtattgttctgttttggactaagcttgaaagctcgcttggcgcgattgccagacttaagatattcaacgagacgaccaagcctgaagacacagatggagaggacattgacgtacccgaacagtggcctcagcgcagcgtggtggaattaaagggcgtttcggaaaaatatgcgtaagaatcacaaaccacttaccataaccttggaagatgcaccactgacttattattagcgccaaagatcaggacgacgggaaaacgagccttactctccccgatattcagctaattattggctctggagaaaagattgctatttgtggtcgtactggcagcggcaaatccagcctcgttgctctacttctcaagctcctcgatccaatatccaccacgacggagaatattacaattgatgacctgccgcttcatcggctgaaccgatccgtgctacgccaatgtatcattgcagttcctcaagaatccgtcttcttgcccgatgggtctacggttcagaacaaccttgacattgccgaggaggccacccccgaggagtgcaaggccgttcttgaatccatcggcttatgggactttgtcaaggaacgaggcggcttggccacaaggatgaatgtctcgagatttagcgctggacagcggcagctgctctcgtttggccgagcccttctcaggcgctccgttcgagagcgcaagtttggggccactgggcaactgggcggcatcctcattctggacgaactgagctcaagcgtggatcaagagacggaacgcatcattcagggcaatattaggactgagttcagagactacacggtgattatggttagccatcgattggatatggtcatggactttgacagggtggtggttatggataccggcgcgattgtggaggtgggcaagccagccgtgttggtgcaacaggctggaaccaggtttggtgatctggtaagagcaggaaacaagtagattgaatggtgttagtgcaatattcagatgaggatgtcgagataggaatatggcccccctaggccttaaacggaaccttggtttttgttatattatatataatacgatggtccgagtgatcagagcgcatcagttatagtgaatgtgactatgtatgtagcctaagcgtatcaatatttactctgagggcctctaagcacccaatgaaactgcttaaaaaggaaatccggtacaggtacatgcgtaacgtgtctgtccaaatgtcgcatataacaatagcgggaaggccagttgtggatgcgctgatgctggggctttcaagccaccgtgactacatacatttaaacgtggagcatgacgcatgtcaaacatgcctacttaggtacttagaatcgaaatcccaataggatataatgctgatccccgcagattagattgtttggttctcaacgtcatctgacgtcattttttaatataggtaccagtggatggcaaagcaataaaatcaaggccaggcacgctcacagtcgtggattactttttgtttcgagctcttctttcctgataagagcacccagttcggatacgcaccgcaatacagtcccaacagcgtctctcctcgatataccaccagccaaaaaactacgcaactcatatctacatacccaccatgccttcaatgcacgaacgtattcgcgaggacctcctcaacaaagagcgtgcgctctggacagctctcacatccgctgatccagcaccagccatctggaaactcagcaaccccgaagcctgttttctattccctcagatgaatatcatcacgcttgaggacgaggacgctttcaagaaagccgtccgaccaccctttcatcgatttgacgcctatcagttcgaggaggtacgagtcataatcgtcgacctgatggccggtgtggtcacatacaaggtgcgcgctatgcgcgggaagaaagaatatactgcctcgggctcgacaacctggagtcaaggttccgatggcgagtggacgctggcttgtcaccaggaaactttgatgtgagaggattgtttgtgtcgttgtttttgtatacacccggtttcttctatacctttcgcgatgcggattggggaagggaatatgatcttgacgagcggcgaacgtctgttttaagtgatatgatgcaatgtatcacgagtcaacgaatattttaatgccatgatacatgatcaattttatgtgaagtcctaggacagttttctagtagataaatgggggtttaagtgttggagtggtcaactaactagcatgatgattactagtgtaaatagactgcgatctacactcaaaactgtcggtagtcagactgttcctatttaatgacagtaattgcaaatttattgcgatcgatgcatattgtattgatgttctcctctgtggctgatgtatcacgtagctcagccgtggcgcagtttctaaagcaccgactctcctttctctaccgacagattttcacaagccaggggtagtcatcaatgatcaagcccgtcaggcaagaaacgacccatgacactatgagagccgcatcaaacaacaagaatcacgagcatttcaatggcgatcattcacttatttcaccgtaggatctcccgaatgcaacaaaaacaaggcctatcatgacccggttcatgaatatatgtctgtatgaatcgtttcaattcttccgatcgtgctggatcatcgattgcgacttaacgtctggttcacccagtaagcacggcgctactatctagaccgcactcgtcatggtcctggcaagtcctctgatagggtctcatgagtcatgctgtttgtgcgggcgcgaaacgtgcctggctatcatttggccttgcgggcgcatgtctggctctttgaaactcactatgacaacttcatgtaactggcggctaacagtccacagatgacattgccaggcgattagtgtcaaaatgtagtgttcactctcttcaccggtcgcttgggacattctgttgccagcattgattgacaggtagtagtcctccgtactctagcggacaacgtttctgccgatgagttgggcaaaatgtacggcttcgtgatgattctcattggcataggaacatcgggccacctgcacagctggcattctgttcgatgtaggcgggtattgtgtggcgtggtcgagagtgcttttcgggttggatatgatcctgcgatgccagatgctagagcggtctacacataccagtgaacatttacggagcgggatgggcaggattcagagaaggaagaattttcgacaccatcgcctgacgcagatccacaggtacataaacagtcaggctgtatcggaaaaacgggtataaaattccatctatgccaatgtagcaactgtcacttcgttagtgatgtcgttggttatttctgctacaccattcgaaccgctagcttcggcacgatccttctgcatgtccgcgatgtgttgtacattgcatttggaagccccagcctccccgctggtttgttgtttgccgctttccagggccagggccccgcggtattctgtcgggtggctgaaggatcaggtggggactcgatacccgatcacgatcgcttttgctgttttaggatgtatctttaagatggtaaccggtgttcctggggaggaagaagttctctaggctcgccaagaaaagattgtttcgagcatatggcatagctatcacgtgcatcgggtttgtgatatgcttcctcaacgaggtccacgatgagtttctttttttccgactaccacgttgggtaatgaatcataacggatttgcagccgttgacgaagatacgatggatccccttcttagtctcgttagctagagtatcttagatggaaggggataatgtcggaatattagatccgaatggcgattcttcggaagtaatgtctctagtatcagtgggacgctgtggatgttttgttcggccgattctaatagtctctcgagtacggagtactccgtatggcacggagaaaatcggatatcacaggataaattgcgtattggcttcgtatcccctgtctaacttcttcatgtctcacgctaacgggcccagcggggatatgcggaccatattccctcaccgcattccatttaaaattgtctgcccgaacgcgtcagaggcatcacacgcctctggtggagtttcgacgtgagaaccaaagaatgggccatgtataagactattgcccaagtttcagcagttcgtatctcggttagagaaaagtaaacaaagaaaaagactaaaaagaccgaaaagggaaaaactcaaaatatcgacaggccagatttcctaagcttagcgcaacaaaaggaccgaaagagggccgatatgcacagaagcttaaatggggccattatgaaattgaggcatcacaacaaagataaccccagactcaaaagtcgaaaaaaagttggacgttggaaagtggaactgggatgtgtaaatctaaataactggggcgagtggccttccaccggtcttctagtcgttcgccaggccaatgaagacgaggttagggaagatacactccgccttgatcaatcccgtgtgtaatccaaatactgtaacatggatttctgcactcgggcgaccggaaattggtttttccatgaaaaatcgtggggttgtctcctacttggtaggctgcatcccggtgcagaattttcattacggtattcattgaaaaagtcgcgtattttatctgcggatgatctgccctaaatacctacgggatttgtgtctcccggacgtatcctaaggctaagacaaaagggacaaacggtgctgtcaattatttctccgtccagcgggcccctgccgttcttagtttcccccgagctcctttcccatttgattcaagactcatatttcctttgattaaacatcccacggaccttctagtattcccccagactcagcgccactcgccaatgcctacccagagtcataaaacaggcgcagtgagatgtgaggtatacactcggatttctgataaccatggttgtgacgtgaaaccttacctcggatccacggattggcaagccgaaggatccggggcaaaatctttagaggcttctagcctgcccgttagtttttttaggtgcatagtctatactcattctggatgcgaaagccggaatcgtcagttgaaaaaaattctgcgatataagctcatgccaagagaaattccctcacggtacttatctctctgggatcttgacacacacacacctccctactcaatacaatggagccaattcgtcccccacagaatattgccattatcggtgctggcatcgctggtattgcctgtgcattagccatatcccaggagctttctcctttcgtaccgaatttgaaaatcactgtctacgaacggcatgatatactatcgacgtccggcggtgccatcaatctgacccccgtcgcccaacgacatctcgctcggttaggcgtgctagatgagttggaccggatggggaccgagggtggtgccgatgtcgatgccattgagcttttctccatgcgttcaggtcgggcgatcggctccatcaaattcaccgacaaccaaggaaaggggttcggcggatacaagggccgaagggtcatgcggattgctctctccgtagccatgttgaccgtggtggagcgggctccgaatgtggagattgtattcggcaagaaggtgatcgatggcgaggaattcgaggatagagccgtcgtacgattccaggacggcaccgaggcggtgggggatttgatcatcggctgcgatggcgtgcactcggcggtccggacccggtttgtggacgtcggccggtctgctgagtacacgggactgtcattcttgcaagccacaattgactcggattcaatttcatcgcccgctcacttccgcacatcatcgctcaatatctcgcgacatggctcaatgcttgccagctattgtgaccgtgattccgaacagattttcgttgctgctattgttcaatttagtcgggaagcgctcacccgctatcgactggagcccggtcaggattgggccactcagaacaaaatccgctgcgccctccgtgcggaggtaagagaccgtttcggcaagtgtgccattccctgtatcaaagaaattatcgagagcaaagcggactggatgctttatcccgtatatcaagttcgccccggaggacgttggtgcttgaatcgagttattttgctgggcgacgcggcacatgcggtatgtcttaatacaacccccctgtttgttcttctctaatggattctacagatgcccccgcgtgatgaatcggctgcgtatgcactagatgatgcgatcttgttctcacgaattctgtcaacctatcgttccgagcctctgacggaggttttcgacgcatacgagaaacttcgtcgcaacacaatcaaccatgcattcaaagaatcccgtcgtatgtgggcacgaaaccgcgacatggggttcttagagggaaaagtaaaagaatggatgatgtctttccatctcagatccaacgaaagttcacgtgaggccgcatgggagttcgacgcaactaagattgcccttcccacaccagcacccagtgaagacatagtttcattgagttcatttttgagagaccggactctatgaaagaagaaaatacaccaaaatatagcatttcacaggactgtggcggagtttaggttggcctgcatggacgtgagcgtgaatcattaatggatacccggcaattagcttcccaaatattcaatagtatacctatttcgatttttctgcagaacccttgtcttttatttatgtcaatgctttttttgggttatccccatggctggagtcacttagatacactcggctctgggacggaacaggctctaccttggtccatcccgatctaccaacatagtttaagttgaaatttcttttttaccttcctcatttattcgccttgcttcacttacagaatttttaaaccaataccggacagatggtgtaaacagatatagatcagtcattaggtggactcccttgacaagtttcccttattttctggagctcactattgtgaattgattgagagctattctgctatagaggaagatctcgaattgtgaaatccggtagactatgacacctacggaatattatcgcaagcaaagaaggtagatattttcaagagactaaactgcaacgaaagacaaaaaaaatacacacaaaatacacacaaattgcgcttctgacaaagcgattccctatttgctacatagtttctccgatgttcacttagaaggtaagtgtctgaccagcagtgccaacaacagcagccttgaccttagacgagccaagcaggctgtagctgtagggaaccgacttcagggttccagctgcggcggtgttttctccatcaccgaagtcattgccattggcgacagcataaccagagtcggtagagtagaggggcttcttgctatcaacaaaggtgtttgactcaactagaagctgagcgccatcgcgggtgttgatgccgtcggcgacgtccaggtagtagttgttgtagatgtggccagtgccgaaacggaaggaaggaccacgcgagttaaggttataccagtagttgttattcagggagacacgcagatgaccggtgtcctcggcgctgttgctgtccgggtgtccgatcagggaggccttccagtggtcgtggacgaaggtgttggacacagtgatgaagtcggcagcgtgggtcagcttgttcacattagcaatctgtgaatttttctggttccacatattgtgatttggacttacatcgatgagtccgtcatagtagtccttgtcgtgatccaagtcggacgagacatcgcagtggtcaatccacacattggttgatttttctaagaccagtcagcctttctcaatttcctagagaaataaatatcccgcagcataatgtactcacggacaccaatagcgtcgccgttagcggcaagcaccttcttcacacctaggttgcggatgatcacgttgctctcttctttgaccagactatattgggtaacaattagtatcatctcgaatccacgttaagaatcacaacatacaggccaaagctggtcaagacagctgtcgagtccttgccaaggatgctagtattgcttccaacacgaacttgtttggctacctgcgtgatggggccgctcacaacgacaaccttggcagagtcgcccgaaactgcggctgtgaaggcagcatacgacgagacagtggtagtagtgccaccagcaccacccttagtacctccgttctggctggcatagccgggagcgacctaattcggagtgacgttagagtgttgatcgtatggtacctgagcgaatcgtgcattgatactcacatcattgacacttgcgcgctttcccagattgctggttgcagtaggagctcccagtgcaaggctggacaagcagccgagcagagaaactgccatcaagttgaaaggggccatcatgaatagaaaaagaaatcttaaggaatgaataggcggactgggtctccagtatgctttgctggagtaagtgagtgttgatatcagagcattgagagtatataacgatgaccgaaggggtttatatatgtaccacccgatagctctactaggctataggagcttctgaaacacgtcacatccaccaccatcctgatcgttgaagaatttcccgtgctggataatctcttccagtccggccgaaccgaagatttaccgagatgtatacgacggcattaattctccgacgcgtgaagtatcagattgatactcccaggacctcctttgtgaaagccaagatcacatcatgtttcctctaagacacaaagcttggcatggattgatcgaagtcctaaatctggaacggacttgaaccgtttggggccaagtccggacaacccgtgtacaccctactggatggagccccttcgaatggagaacagtcgtcagcgatgagctgcttgttgatttattcgctgtgccttctcaccggaagaattccacaaatggtttgaaacatcaggagttcttgccaagagttccggggtttcaacaggatctcccgatcttggcatcagaagcgtcaagggggaagttatatttccatcaatcgtcaatcgacgagtttcggggtatacgccttaattcttttattggagttcagagttgaccaggggaaattagcgctaggattcttttgggatgttggtggagggttcaacaatacgagtaaatggcgtgatcgcgttggttaatgaaatctttgacaacctcaacgtccagatcttcagatcttccacatatccaacttagcccaaataagccctgggactctatagactatttctcatccaagttattcccggggttatctggtaagtaacggtctcgcggctgagtaatcgctgttcttggatttgcggggaaagcgaactgcgatcaaaaccacctcacttgatcgcaataggcggaatgacagagacattttcatccgtgccgatcgtcgacttcgctcggttaaacgatccttcaacgaaagatgaggagctgtcaaatttgcgtcaagccatcttcgttgttggattcctatatttgaccaacacaggattagaggtgcgagcgatcaatgcgagtgaccgaaatatgctaataattgagatagagcttaattaaacgtacccatgaaaatctacccaaactatttgccctatcggccgaggccaaggagaaatgcaacatgattaactcgccatcgtttcttggctatactcgcctcggtgccgagaccactgcaaaacaaacagacctccgcgaggtgagactatttcttttcggaacctggtgcagttctcgggcactgattttccgattttagcaatttgacttcggtacccctggcgtgagaccctggacagagcaggaccccttttggcaacggcttgaagggcctaatcaggtaggttgccctctttgaacgcatgccctgacgactcactctcaatagtacccagattatccaggcgtgcaagatctggtcgaagaatatatcgcgaagactgatagcctggcacaggcattcgtgcgcctcgtcgcagaatgcttgtccctgccccgggagacatttgatggcttcaagggtaatatgagccggctaaagtttgtcaaatacccacccgcagtgcaaagctcccagggtgttggccctcacaaggactcggcgggtcttttcacatttctgtcccaggacaacacaggaggactccaggtactcaacaagaacggagaatggattaacgtgcctcccattgagggaagtcttgtcgtaaatatccaacagggattcgaagcgatcactggagggatttgcgcagccacaacacaccgggttattgtatgttcacaataccattcatcactggaggacctttctaacatcttgctattcctaggcgcccacttctcagacgcgttatagcatcccgttcttccagggtgtgagactagacttgacgctaaatcagctgaaggaatccgctgctcacatcgtgcaacgcattccagcctctgacgacaagaagaagcgagcagttgatgtgcctagtgaattcctttctcctttgtattcttgcgtgagtggttttgttcaacgattatacgcatgggactaacggatcatagttcggcgaggctcacttgagaaatcgcatcctgagccatccggacgtgggccaacggtggtattcagagttgtatgcaaagtattctcagcaggtcctacaatagtctagggaattgaacgttgacaatcccgacacggtaaaacattgaattggggtttcaacgttaaccctgactttggggaattgccatatcctcgcctacggctttctctgcgtacaaagttcgtgttgtatcgtagtccaggctgctttcagtcaatggaatttagcattcttatttttcttcctggttctattccaaatataccaattgagggctgtctatatggtggaagtgaagtatatgaacatgggcttctattcaagctttaccacagtatcacctttgcaagaattatgcctagacaaaggctataatatcgtgtgaatcaaaatcctggtatacgtttctgcgcaaatttgaagcaaaatacaaaataagccaatctttcgaagcaatgtgcgaattcttaccgacttcagttttatcctcgctttgtgtaaccgcggggtaaatcttcgtgcccaattcttccactttcatgttccaaccatgcccgaaatgaatgctacagcactcgacgctctccggagccgtttaaagactgcgactatctatgcacctgaatcagagggttacaaagacgttttagtccgctggtcgaatactggaatgaaatatgcggtacggaaggaacataaaacataacaaacaagatgaccgactgataagttgcagggcgttgtaatccaacccattgacacgcttgatatctcgatcgcgctgtcctgggcacaacagtacgatgttgatcttgctgtgaaaggtggaggccattcaacggccggcacaagttcgagcgatggtggcctggtcattgatctgtcgcgcatgaaccaagtgacggtggatactgagcggaagaccatcaccgcccagggtggagcaacctggaaggaagtcgacgaagccggtgcagtccacagtctggcggccgtagggggcaccgtaaatcacaccggcgttggaggacttactctgggaggtggctatggctggctgagcggacagtatggtcttactattgacaatctcttgtcagccacagtcgttttagccgatggtcgtattgttactgcatctgcgaccgagaacgtcgacttgttttgggggttgcgaggcgcaggctacaactttggcgtcgtggcagacttcacctaccaggcctatgaccagaaggatccagtgtactccggccttcttggattcacttcgggtaagctcgagggagttatggatgcactgaacaattccctggcaaaacccgactctcgctttggtgcgatctgtatctttgccttggcaccagatggatctgggccgatgatcattgtaattggcttctacaacggcccactcgaagaaggccaaaagagattcgctagccttacagctcttgagccagttctgaacactcttgacatggtcccatactccgtggtgaatactctacagaacccccaagcgacctatggtgatcgaaagtctttcaagggaattttctacgagccgccattggatcctcactttgcgagagtgatattcaatgatttcattgccaagatccggagtgaaccagatctcaagacgtctgccatcattctcgaatttgtcgacatgcgcaagatttgtgaagtgccgctgactggaaccgcgctagcaagccgaaatcctactcagaatgggatcatctatttaagatggaccgactcatccaaagatctagagcaccgcacttgggcacgagaagttcagtccaagtggaaagtgaaattggatgccagaaccaaagaccagggtgtggattcgggcgtgcctcagtacatcaactatgcagaacgtgagtctgattgacagaacttgtccctcaatatatactaacatcgtacacagctggtgactcggtggtaagcaatatctacggcgaaaatcttcagagactgcaagaggtgaaagcgaagtacgacccaaagaacgttttccacaaaatgcaaccaattccaatgggcgcagacttgaaaaagtgaaaaaaaacgcggctattggctggcctaatcatttctgagacatttccgaacaatctctgtattatctttggtatctttaccatcctctacgagaggacgcaaagagatgggactgcataagaatggcatatattgtaggaatatacagttttatatacagctaggagcgtcaagagaaacaacttgaaacctagataatacataaaactcaaagccgtggaagaatgtgatacttgacagcctttacagtagtccaaccctcgagagcctcttcgcccatgtctcgaccaaatccactttccttcacacccccaaatggaacattgggactgagcatcgcccacgcgttgacagtcacttgacctgaatcgagttccttgatcacacgatgggcgcgattaatattgttggtaaagatggcagcactgaggccatgatgggaatcattggctttgaagataacttcctcctccgttataaacttggcgatactctaatttgtgccttgattagtattcaaagtggcagattcttgcatggaagcttgcttaccgcaactggaccaaagatctcctctcgcatgattgtcgcattatcaccaacgtccacaaaagcagtgttttcaacgaaatatcccctgtcacctatctgctcgccaccaaacagaagcttggctccagattgctttccttgacgaatatagtcaagaattttctcatgctgcgcacggctaacaactggcccctttgtagtggaagcatctaatggattaccggcgactgtcggagcatcagcggcggcttttttgaaagcctcgacaaatcgatcataaatggtggcctgaacgtagatacgggatccagccgcacatatttggccattattggctgtaattccaatacgagtccagaggagtgcatttgcaatatcgcagtcgtcaaagacaatagacggccctttgccaccgagttccaggctgaccttctttaggttagttcgcgatgctgcttgcaaaatcttccgccctgcaagcgcactaccagtgaaggcaatcttgcgtacatccatatgttccgacagagcctggccggcgctggcaccctcgccgggaacgatgttcacaacgccaggaggaatcccggcctctttcaccagctcggcaagtctcagggcatatagtggcgataattcagaaggcttgatgatcaagacgttaccagtaaccagagcaggagctagcttccaaatggtgatcatcctaagaacatgttagacgtgaatgagtcgcttggactggtaagcttacagcggagcattccaaggcacaatcgcgccacagacacccaaaggctcgcgatgggtataggcaataccaccttccatctcaagggtcttaccatcgatctttcctgcccagcccgcgtagtatcgcaggcagccgaccgcctgagggatgttcattccgattgaatcggtatacagaacgcctgcatcaacggcttccagggatgccagatcttccgcatcgcgctcgaccagctctgcaagtttgagcaatagctgggctttgacaggtccgggcactgttctccacgttttgaaggccgacttggcggattccacagccttgttgatatcctccgggcccgcggcggagattgttccaagttggttgccggttgatggattttccacaactagcgtttgaccggcagaggagggaacaaattcattgtggataaagagtcccgtcggaactgagagggttagcaactgttgcatctagggccaatatagacttacttgtaatttgacggccctggacgcccgtgacagtcaaactagaagacatttttattgtcaacgaatactagattcgcaacttctgtcatagcgcagactttcagatgacttttgtatctgatctcctcggaacgttccgtcccgcggaaccgtcctcgacccggcccgaggtatgtggagaccgatccccaaaagaggggataatgggttgttgggagtgatagtattctgattcagatcctcgagattgaggagagaaattacaattactgaaggccacctctaaggtattccctttgtgtgcaatctgtgggtgtgctttatcttctaattgagcgtaaactagagagggcggaaagccagaaacgtgacattctcgcgtgtgtaattatcgaaacgaagcatcgtagcatcattccccaatccgaccggactcatcctatgtatcgtttttttttttcgaaggtggcaactgaatagtaaccgtaatggacgaagataaacgatgcaagactggcctatattcgatttatccgtttaatattaccatactgacattcctgacccctgagtgaagtcttaccttgataacccaaagactggacggaggaactcacaattatgtcatctacttagctttccaaaaggcccatgctaagacgagcaagcccttgataccggccgataaccaaagaataggagaaatggctccggtgaccttggtgacccatccgccgacgatggcgcccacaagcgtcaacacaaacgcgatgattcgccggtcgcgtttcacattcctcacaagaaacagttgagggtccgacattagatcgcagagaagactggtaatcaccacggtcggcatctcattgaatcccaatgcacggctcgctacgatttgaccggcagactggagactaagaagaacaatggggatttcctgatcccatgggggtattgtctccgatcctttgccggctagcgtgctagaaacggcacctccttgaacaagcccagctgtaagcaggattatactagcctgtaacaggaaagacagcatcagcgaccctcgccgccgagcacctaggatgcgatgtagacgtgcgaaaatgaaggatccaaggatgaaacagccgatggacgtgagtgagcgtgcccagccatatggacgaaggttttggtgcgatgcacccagcccgacgaagatcgtattccctacataccactatgattagtcgaccctggcttggatgggtgacgttgtaatcttacctgtttgcatagacacaaaagtgttgtaggctatacatgttagatattccgcagttcaataaacggacctggtcttgttcctacctctatatatcgtgctatccacaagtcccgaagtcaaacaacaagcgaaaagtaagaggtcagcatgctgtggctcgagctcagccttcagagatgttgaaagtccaccgaatgcacctttgtcatggttcatcttggatgttattgactatagtgagagagaaatgaagggaaggatgaaaagacaaggagatacaggaaaccatcggaataaaatataattgacataaaaactttctcttttccgcggggattgaaggacgggtaaataaactatgagatctcccaacatttccttcccctcctctcccctggtcaatcgcatcatcatctcacttaattgatgcatcctaagacggagccaaggggcagtgaaaacccccgaagttccgttgaattctgaggaatctgcaggactcgaagcgagataaggacagccacaatcacatgtcgtgcatgacagcctgaaattcctgttagacgggccgcagaccaagccgacttcatactaatttagtctccgatgcatgcctaggatgccaaggaggacccggtgtgatgagcgttagttgcttggcggcaactttcttctccaaaattccatctgcaggcaggactcgtgtaacatgagttctcatggaggggttgatgtacgacccgctatccattatccccaattcttgtggtagccaagcgtctcaggggtttcagacacagctttccgataggaccataccagagacgtcgaggccaagacggacggatcaatggtgcatattgctgcagggcaagcccagcaatcaaccctccagctcagccttgagcacatcaatatccaattctgccataaccccaagcacgacacccagactctccataaatccattgacagaaacgcgcagcatccggttggtcgtcgccatgtatgttattttcaagacggttttacactcgtcagggtcctgtttttgcttcttctcttgcggctcggatggtgcttcgaccaccggagttccgagtgtgaaagtccgtcgcacaaaaggggatagttcggcgtcaacttccaaagcgcgcagagcgcatgatgcgagatgattgcttggaaggggaagggatattgtgctgagtcaagaggtgagtattgcttggtcttgtttttttgggagctatttcggggtggcggggggcttacagtgagtaagggaagtcgggattggtgggttgtatgagagccatgataagcgtaattcagttgggaaaagcgaaagaaaatagtccttctgaattccaaattgcgtcttccaagcagcagggatagatcagttattggagtggtgaggatgatagggtggaaattggcgatgcactcggagtcctagaggaggaattccggggggggaaatttacatggctgactcagctccacggcgaaagccgaaaggagaagtcttaacttacctaccttggcatttggtgtacacactgcacaacagtacgcgtggattcgctacacagcactacaatagcaccttttggtatgttttcgggtgatgatcttctagtttgaagagcttggcgaaccacggtctttgtggaacggtgcatttggccaagaaatcatttggccaagagacggtgacccgatatcgcggtgcagatctctcctgtgagaaggatgcaaaatgcactgcatcactttgcaatatgcagtcaccttgccaaggtgctcggattgattaaattgatgtgagaagcaagccatctgagtcaagattgtgggtcgagtttcccgtcgtcagcctatcccagtcaagctcaaaagcccgaagtagacatgcattatctagatcttggctctctatacggagatatatgtatgcaacgctattgtggctctttgattgatgggaaatatgaacacctgctccgcgactagcgctcttaatcttgcgcaatatgtcttcttcgtggactcactcagctgaggtcatccaggatcagtacgacgcgaaggaagataagccatcaggacgtcttggcagatggtggaatgttacatccctaaggaaccaagacttttgcctttggtgagatgtttttgtcctctacgagcaggcagacgcttctcttctgggattggtgtctgcatgtagcaaaattacttgcagggtatagaactcgaaaatataaagagcagcgttgtccttcgactgtagtacaagaatccaacggtccagactcaaacacatctcatttgccaaagttcaaacatgactatcacaatcaccgtcgagaaggatggatactacgaggtcaatgggacccgacaggaacctactgtctctctctatgtgattcccgcagcttccaagttgcgccgcatgctgaaagacaccaaagacctcatcgtgtgtcctggagtatatgatggcctctcggctcgcattgctatgcaggtcggctttaagggactgtacatggtaagaactctgatgtgtaacaccacatccctgtataatgtatgctgaccaaactacatagactggtgctggaactactgcatcgcgcctgggcatggctgatctcggcctggctcagctccacgacatgaagaccaacgctgaaatgattgcaaacttggatccatttggacctccattgattgcagacatggatactggctatggaggttagtgactcaggaacactagacctttatcatttagttgaaaagcattctaactctctttcaggtccgttgatggtgtcaaaatctgtgcagcaatacatccaagcaggcgtggctggcttccacatcgaagatcagatccaaaacaaacgttgcggtcatctcaatggcaaaaaagtcgttagcctggatgaatacataatgcgaattcgtgcagccaagctgaccaaggatcgtttgcactcggatattgttctgattgcacgaaccgacgcactccagcaacatggctacgatgagtgtattcgtcgactgaaggctgccagggatattggcgcggatgtcggactacttgagggttttacttcaaaagagcaggcccggcaagcagttcaggatctggcaccttggcctcttcttctcaacatggtggagaatggagctagtcctctcattaccacaaatgaggcggaggaaatgggcttcagaattatgatcttttcattcgccacgatcaccccagcttacatgggaatcaaagccactttggagcgcctcaaggcagacggagtggtcggtgtacccgaaggattaggaccacgaacaatcttcgaggtctgtgggttgatggattccatgaaggttgacacagaatctggaaacgacggttttgctgaaggggtctagtaactatttagtaactagtatggatatatgcatgattttgcatcggacaagcaacggagtttctatagctagatattcaaattggaagcaatggtcgtaatatataattccccgcataagccaagatcattctaaatctcaatcaagtctgggttgccttcataggattccatgtcatcgaccatttcaactgaagggatcactggtggaatctttttcacaatctccttttcaattgtcgaccattcgcctttttcaacgattttatataatccaggccaaaggctggcctgaacaaatccatccgaggtatcctcctctgtgagggttcgcatcttcttaccccggaaccgcaatccgtattggtaactaccccagaaaacgtatttgtcttcctggcaatctaatttatgtttgaacttgatgcagcgcgcgattatgccgtgtagctgttgcattcgctttagtctctcggtgacggcgtagcgaccgaagcaggcctctgccttctcgatgatccaattacactgttcttgtaaactagaggtttccaatgataggattgcagagctcatcgcacatcgccaatgtcgggaaatgtggctagaaactgttgttgttagaaagcgacgacagtagtgatcctccggggctcacattgtttatttatttcggaatcgactttgcggagataattactccaactttgctcagctccaagcataaattggttccaaaagaaccggtaaatcagcccggcaatttccgactgaataatatccaatgacgagatgtcaaggctatctgatcttggcgtgggatcgttcccttgttgtgctggctttgctgcaaagtgggtaaacctccagtgctcaagatcgtgatagagtagacacatctcttgtttggcttcttcatcagagaaagtctcagtcccagcttgtaggcttgctatcttggtcatgaggattcggttctcctttctggctacatttgattcccggatggcattgtcgagcagctcgcctcgttgacgagcctgctcctctgcaagcagccgatctcgttcaaacgtctctgctttattttctgcgattttgattcgctgttttgttcgttagataaaaataaggtagaggggccttgaccacaaacctctaggagccgttcaacctcatcacgcatggacttattatctaggtaagctaatccatttagtagataccatttaagtcgtgacggggaaagcgaaccaatagcaacctgtccccatttagaggataaatctggggacgtttgagtactcctgttcgcctgctcaggcttgggttcgtcgaaagggggccacattgcataccgatagccaagtgatgggaagtatgaaatcataaatggaatagtttcaattctattcatgacacattctccaaatcgatgacaccacaattagccgatgttgtagacatatgcctcacgccgacgctctttacggctaagcgtaggagtcaatgatctcaaagttgcgaaatctaactttcgattgaagaaacatcaccttgtctgttaaaaaaaattccatcttgtactctattttccgaaatttgataagaaagacaagacgtacaaattcaacatggcgatcgcagatgagcgaccaaaactcatagtgggtgttgacttcggaacaacattcagcgggtcagtaaactttctgttctggtagtaattaatgaagcgctgacatcatttttatagcgttgcctggggattggaagactgccctgatgatattgagctcattcagacatggccaggtggtggcaacagtgagtctacgggacaaaagagaagttcatgaaactgactgttcaatagtcacaagccagaaagtcccaacattgtgttcctacgacgacagccgaatgcaatggggttatcagactaaccggtcaattcatccgggcaaggagcagcgactcattcaaggagtcaagctcttgctagatgaaagtcaaaaattccgctacgcacctgctgctgactctcatgaaatcatcaaggacatgaaaaaaacaccaacggaggttgctggtgactacctgggaaaattagtcggccacgctcatgatgtcttgacgcgtcgctttggtactgccctgcaaactatggacttagattacatccttactgtccccgctgtttggtctgataaagctaaagatcttactatgcaggcagctcaacaggctggcatatctgctgcgaatttgagactgttgtctgaaccggaggcggctgcagtctgtgcaattcggacaattcaaccgaatacaatcgcagtatggatctcatcataatgaattggagtttaataatctgataagattctaggaagatgactgcttgattgtctgtgatgctgggggtggaacagtcgtgagtctttctcgtatggaactggtttgataaattttagtgacactcatcttaggacataatcacctatcgcgtcaaacaaagcgacccgttgacattcgaggaagccacaaagggaactggtatttatgggaaatgtacacttttggttatatctaacaaattctaggtgctgtttgtggctcagtgatgttagacgagagatttgacgcacttatcaaaagcatcattgagaagcagttgcataaaccgctcccccagtctactgccagggctgcacgaaagtattggcaagactacatcaagcctgggtatacaggtcctctcgacgacgatgagatgtgtgacgtaggatattgggtcccagttcctggagtatcgggtatctcaaatatcgagctcagtgaggggcatttatatctagacaggtatattggatatatatatttacttcaccaacccattcgtgggccacactaattcggatacagagatcaagtgaaaggcatcttcgatcctatcatcaagcagattgagaatctcgtcgccgagcaaagaacgagcgtcaaggtagcaggtctttcgacgaaggtgagaccctaaagcgctatcaaaagaagctcaattaattccaattaggctattattctggtcgggggccttggtgcctcggggtatctcttcaagcgtctacaggctgctttcaacggcattcaaatcatgcagcccccaaatgcgtgagttctcaatctttcaaaaagtcaattcaaaacgatactgatataaaaacaggtggtctgctgttgttcggtacgtatctgaaacattcataacgcttgttttgtatctgacagctcaggggcgcggtcatccgtggacaagaagggaatcaagtagagacccgcattgcccgatgcagctatggaatttcaatgaaaatcaagtttaaccccgaaatacaccgcgcagatgagaatctcatgtggtgtccatatgaagaagtatggcaagtgcataagcgcatgagatggtatattctcaaagtgagtaacctgccacttctactgggtatttttgaagagattttgagtgctgacttgagggactttgagggaaaccccgttgccgagagtgagccgataagaatgggcttctaccgtgtggtcggccttgggcaacctttggtatttcaggactcattgcagttttgccaggggaacaaagcccccgaaacgatggattccagtatgtcccgtgtccttatattggcaatatatgaaagcggccttttactaaattgaacaggtgtcgtgaacctgtgtgaagtggaggcagatctgagcagaatcccaagggagctttttacaaagaaaacgaactccaaaggtaacgaattttaccacatcgactatgatttggttctaacgccaacttccgcatcgttgttgttcgacctgcaattcaacggtgtctcctacgggagcgtgagatctcgctattgaattccacaacggtgggctaggaaaggtatgtttagggtagctgatttgaaagggacttttgcctatgataaaacgtggctatggttttcgcaggctcaatacttgatcgcttgagattggctcgatgacataattgagaggaccgaaataaatagttagctagcaatgcaaacttgatatgcgccttccttgtgatgaagtgtagataaaaatgtgtattgaagaggattcaagtaagtccaacaacgcaggctgctgcagacgaaattcgaagtcaaccttccctgctaccctgaaaaacagccaagtgttgcaagcccgggccttccaaaatatccaagggggccacaaaagccatctgactccatgagaaatttttattctttccgccatagataaacacttcaaagcggccgacaaagtcaccatccacccacacgcgacttccatatatctcatttgtagagatagtgacttgtgatttgcgagggattatgacagccttgtgggttgacgtggtcttattaacccaaattcttccaggctggtcttcgtcaaaagcgtcagcctcagcaacagagcgaagtgggtatggccatccatcagaaacaaaagccaattcaccgtccgatgataatgtaagtgtcgcatcggaggactgcaaagaaaaaggacccgtgacgtttagttgaagggtataatccatgcccttacttccatagccgaggttatgcttatcctggctggtagttggccttgtccatgaaagcaaagttcctgatccgtgggccctttctcccggaacgcggcggtcgagattttgccccacagcttgagaggacaattgtgcgatggatttggccaaggttggttcatgcaagggaggcccacgcgcaccacaccacactcgcgaagccacgactgggatgccatcacgaatggcatagtaggcctcaagctgagtagtggcatccgggccactgtcattccaggcagccaagagagcacctagtacagcttcggtatcgggttgttcagttttgttcaccggattgaagagcccaggggtccactgccatccgtgctggtcggcgaagttcagaacacgggcgttgttgaaaaactgaggataaggggctggggtgataggcacatggttgcttttcagcgacatatatgcccaccaatcctcggagttgatgatctggtagccgttttgggctaggtcaactggatctgattgtccatactgccagtgttgaattgtcacattcttgtcaatgggaatgtttgatggctcatatgtcccccaaatacgaacacttttgccagaagctgcttgtacaaagcgagacatctcgttcacgaactcaacatagtcatccgcaaattcagagtcgtactcatcggcaccgatatgcacctcctttgtgtggaaccaaggaagaaattcggtccagatggacttcatcaaaggaacagtgtccggatgcgagagattgagcaggtccctcgactctaacgcgagctcaggtctccatttcgtaactgtgagacagtgcccggggctttcgatctccggtatcactgtaacacctcgctgagcacaatggtgctggaaatcatcaaactcagcccgggatagcgtttcgttggcacgctggacaagagggcggagggcctcactttcggggtgcaaggaaaactgcgagtagatctcgttccaggtcacgtttcgaccgcggctcagcggatagttgtcggtcgcatggtagtgaaactcggataatttgaagaacgaggcgtaggtgcataaatctttcaaaaactcgagtgaataccatttgcgaccagcatctagcaaaaatccacgagtcgcataggcgggtgcatcttccacgcgaccaggttgtagggatgagcgtgtcaaaacgagttgctggaggagcgttcgcgttccccaccacatacctcgcgccccggagcctcgaataactacactgccatcttgtatttccagctcatatccctcctcggtctggcgtccactttcgtacgtaaaccggtcgggatggtctgtgcgcccgagaaatattcccgacgcatgtttggggaattgcttgaccgtacgaagctcccaggaactgttcgttagctcctgtaaatcatcgcgaaacgtgttggcaaagtcggatgccgatggtggaagcagcgttagtccattctgatccttccagctagcgaaatcggcacttaggtagattgttcggtcggtggttgctaacgaaaagcctttgttatgaccagagccagtgttgtcaaagtgcaccgggggtaggatctgcagcgcagacgcgactgcggcaagtgagaggacaatccacttcatgtctggacattgtgatattggttacgatgtgagcccttttatgcaaagcaagggattgtatcagcgttacattcctgattgtacaggggcgtgggggtagatgttgtggggaggtggggaatttttatattggcagagtggttgttgtggatatcctacttatttttcatcttggggtatagataagaaggttgcattaaaaaacttaattgactattctttctttcctgtcatggtaactcgaagcatgaaatcacgcctcgtcgaagccatgctgaggccgagttttcatctattgattctcaatggcatatgatgcctgtttcttactttttattagtatagatagatctcttttgaccacttagactccctgtttccaagttagagaattacaagaatggcctcgttatgtcattttggtagtcttttagttagtcttcttaaaatatactaatcttcttggtacacgggacgggaaagggctaaatttgtgaacctttcctaggtatgtataaccttagatatgtggtcaatatctctttctgatccttttctattccagccgttgggtgctactgctaaatagtcccacaatagcctgctgacagcttttcagatgtttaatcgtattcaaccctcctcgatttctaagggcagtttccaaccacacacaggcccatgtcatattccataactcgttcaggagaactcatatcaaatttgcactcgttacacctcactccgtatttcctcttctttcattcttccatcaagaactcgcgttttctacgtagctcacgacaatctcattaccacaacgaaaccgaatacacataaaaccgcatcaggccgacagaaataagtcaagtgagtcttagagttcaacggtgcttttgaatatgagtgtggttgttttcgtcaacagtttcctttagtagttgggcaaaatatccaaagtcagtgtctacgttgaatttcttccagggactctcggtttatatgggtattacaatggtagcaaagatactagagctcctcggaggggactacggggactctcgattagggcacattggggatatgtcacccttgaggtcactgattagcagtcgtaggacgggtttctcacgaaccacatcgatagccctagcagtctctaacttgcggtcatttatcggccactatgattgttctagcatggagtttggaccaaaatatccgtagaacgttcgacctcagttgactaggcaacgggccaagcgttgctccggatggatgaaacaaaatacgccctgatatcgtttcttttaagccgcgttggatacctactgttggtatagaaattttttaccttagtccatcccgccatttttaactctgatgctgttgttagaacatttgagatgtgcaagcatacacgaattgggcttcatccatccagcggagaaatcactagagacttctctttctgtctggaaaccaagatatggtttgcaagccgagcctccaaaccccaccgccaaccactgagaggatatagaaccttccccgtatgcggttactaaccagcttgggtcggcgatggaagatcttcaagcgcagggtgcctaagttatactaactccgttatctccccctcaccccgacatcaaagaaacggatatcataaacattaccaggtatgatttctttccatgatattcgccgaattatcagtgaactcccactaataggcaccttttcactcatcttcaggctcatgtcattttggtcaggcctcagccggcaatttatttatgcggcgatacctaaaagcctaggtctagacactgcgcagggccaacacgagaaattattgtatgtaatgcaagcatttccccgatgattcctccgacaacgaactttgggaatcattaatcaactgacacaattccttggcgagtgttacctttacagacggactattgttgcagcaagggcggaaagtaggtgtatctgtatccaagacatcaggaattctcggtagggatcgacaaggatcgactctacgccgaggaccatagaggaccttctcagagtggcgcagccttagcggtacatattttgcgctatcccttcaatgaacggggcctggggtaccccagctaattatttaaaattattagagttaagatctccctttcaagataaaaagttggcacacagccgtgacaacatccaactgagggaaagcctcgtggcatcggaatccccacttaacctttcacccttgccgtcgggccttatttttcaaagatggcgaataccaagactgtgagctgaactacacacctagtcatacctcctgtgtgttacaatatgttgcatctattcaaacctagacagtatcttcctatgcggtgaaacattcgactagatcatgacgacctaatggatcatcgaaagagcctaatatccacttatcagcaattgaagtatactgttcaactgcatccttgatctacgatgatcaggtggtgatgtcatactcacagcaaggacaatagttaaacgtggtttcaagccaaaacaccgcccagttggcgggctggccaattggaggtaaacgaatgacatccacttggcattatcatgtattgttagcggctccatgaaaagactgattttttttggctgaagataacaacagcaaggggagaatgtctcacaccttggcatataatattgctttttcgaatgcaaacatgtggttttattctccatttcctttttgtggatctcaacttctgacggccatgaaacctcccaatgtgatcgctattgcacttctcctttttgagttgggcgtatattcctgcagcccacatatccattacaaggagaatatgccaagattggacccgtcagcaccaggcagtgcctgagctgcggtttagtcaacgtacaacatacggggtacggtatggaggatcaaccttgtgagcgccaagatctagtattcgaggctgtgttatgagaacttagtcgttggcgtgcacagataagactagtggtgaaccattgatgccgccggagatcgttcttggcgactagtcctactgcagcgcttttggggccccggacggactagtgtcggtggatacgtcgatcccttggcaatcgaagtgtacccttttgacgttttcaggggccagaacagacaatatgtactctctaagacgccatctcaaccaggtaattgcatatcaagccgagaatcatagggcaggtgagtttaaataatccgatgacaggtcgcaatggtcccaaatttaaattcggtcgattgccgcgcgctgattctgcacatgtagccagtcaatgccataacgcataaccatgctgccaagaaagaatgtgaggaaatgctgcggattgctccttggaatcgagaaatcctaggaatcaggtcttgacggattccgccaggccacggtagatcctgaacccgcaccgtctaatgtcgtattatagtttgatttataatgggatctggggttgaattacgcatgcagcggagataattatagtgccaagataacgcccagattctgctaacatggatctgtgagatcatctcgttttgggatgatcatttctattgtggctactcactttataagactacgcatgcgatatgatttggttatacagtaatcgatgttatagtgatcgcatacacacagtgtatgtcgaatgaagagagaactagatctagattaagtagttcggttcccaatgtatccctctgcggtgtactccgtaacacataaacgagacgcgtagggatggggcaagtatcagtgtttcatctcaattttcttatctctcttggcgaggattcagcttattctcttcatggagaggatcggaatggatccgaaagatggatgagtattaaagaaagccaaatccgttgtgccattgtggcaatctatttctttccatattggcacagctacctttcaatcttgattctattcataataaacttatccggcttgaataatatatgcataataataatttgaacatgcatcgccagccgccttcctcgtcgggatatatcgagccactcacaacaccagcccaccgtgcccctgaccatcgttctatctaccaaacagaattaacagctgcaaattctcgttcggagaaccccaatgaagatttcaagtatacacagggtatttggtcttctgggggcagcacggcagtgtctgtctctggcaatcagacaccagaagacaacacggtttgctcaactatttcccgccacttccgagcagacatagacactacgcatacagatattcctcttatagtatgtggatttgttggtggcttggtagatggcctatcattcaatgcatggggcagcttctcaagtatgcaaacaggtatgtgaattctatagtcactgttttcccgtgcaaagcccgtaaagctaatgacaaacaacacaggaaataccatcttcttggccttgggagtctctggtcagcccacaaccccagcatatctgtgggcgaagtccctaattgccctggccgtcttccttgcaagcaacatcttattcgttcacatgcatcggctcttgaggccacgtcgccgctcgactatgataatctcatttggtattcagactattgcgcttttggccacagcaattcttatccagctggagatcatcaccccgaagcccgaggacccccgggctccgatcgaatggatgcaagtcctggcaatctcacttctagctttccaagcaggaggccagatctgtgcttctcggatcctggccctagatgaaatcccaactgttgttgtgacagctctgctatgcgatcttcttgtcgatccaaagctgactgcaaaattcaatccgaagcgcaaccgtcgagtcggggcctttctcgcattgtttttgggcgccatgaccgcgggtggactttctaagaccacgagtatggcgtctagtatatggcttgccatgggtctgaagttgacagttaccttggggtggattgtttggcgaggggaggggaggagaaagagtgattttgaggtgtgacttggctttgtttctttttacgtcgcctattcaaaaggcatgtacacgagcccatgaaagtttcaagtaactctttgtttgctttgttgaaatacccagttattttccgtcacctatcacctcaattcgttcgtcttctgtagctttcccacctttcaattttagtatctgatcgaaccactgagcacatgcgtagtattatatcgctcttgcttcccatcaacctcgttatcgcagactttactattgcgagacttgccgtccacagcacctgcttgcaagatctcacacaaacagctcgccagaccatcggagtcaaatccccgtcatttgtccttatcactccagcaagccaagtacagcagtagcatcttacaaccccgcgctcaaataattacctaaaagctcgcccatcagctagtctctcagtatctgcggcccagtctagcatgtcgtccacttcaaggtcaccaaccagcatcatactcggaagaggtttttaaatgtcgactccgacagggcaagaaatacagaacctagaagttttagtattatcactctttttcaatttttgattacctagcatatgtaataaagttatatatttaatccatattcgagttttagaatatacttcagggagccctctaataatattgtaattcaaaatttcaacctataagaatatcgactctgaaggcgtccataaaacttacccttcaactatataaaatcatttgcatgaatattagtgctatccttgacatgaaagatcctagtataatatagtcgatcgatgagcatttcagacaattcttgttttatatttaacatgatattgtgtaccatatctcgtacataatcagacatagcgcagaaatatatcgttgtttccacaagttcctgtggtatgataaggatgtataatcgaaatctagtctatgattttataagatgactattctaccggtacctgacagtacctttttttatttgctctcatccgagagaacgaagtggagaactccgggctgtccactggcgcgacccttgctctcggagacatagatgcacttgcggaaggtaaccatcaaggaatataagaagctctcatccttctgctcgtggtagttttcaccgagcataggctggatggccttggtggctttctctgcattgtagaacggaatgcggctgaagaggtggtggaccacatggtaatcaatgatttcatggaagaagtgacggccaatgaagccggtcgtgcggtcaatggtagccagtgctcccttggtgtaagtccaggcttcggcagtgtagtgagcaacctcggggtgggtgtgttggaggtatgtgatggcaactattgatttgattagttctcattctaggatctcaggtaagatgggaatgaaagacgtactcagccagtgatgaacccagagatatggcacaacgtagaggaagaagacattccacgctccgatgatagttccagtgtaccacacgatagagcccatgatcagcaagccgatgtcggagtaggcaatgagcttccactgagcggccgtgaaaattgcgctcgatgggttgtaatggctctcaaacttcaccttctcgcttccatccgggccactcttggtaccggcagtcacgttcaggatgagatacatctgccatcccaacaattggtgtccgataagttggacaaatgagacaatgggtgtctcctcggcaaggtgcttcaactgctcaacgctaacatttctcttcgacgccaaatcatcctcggtccaggggacaaagacggtgtccttttccatgtgaccagtgtagcggtggtgacgagcgtgtgtgatcttccatgagaagtatggaaccatcaggaaggagtgtgtagcccagccaatgaaatcattgatcccttggtgctttgagaaggcaccgtggccacattcgtgagcaagaatccatagtcctgtgccaacacagccttggaagaacccatacacggcccaggcaacaattcgcataggcagagaagggagaaggtggatatggagggcagcgtaaatcagagctgcacaatagatagaatctcgaaggaggtagaggagggaggttgtgagggacgattcaaaacattccttcgggattgcatctttgagggattgcaagctgggaatatccgtctgctgtaggactggaagattagcacatgtgcactgtttattggaatgatctggcgttataccatacctgttctgcctgtttgacaggctgcctttgtgtcacagccattttgaagcggaaaattgaagatgacagatacaagaaaatatgtagaggactgagagtagttttatttcatctgtcttttattttattttttccctgcccccttcgcccccataaagtatcccctaggctcgaaaaaaatgagctctagattgtcggaactcaaaaaaacattgaccaatcccctttttcgaattcttttccagaacactgtcaaattcggtgcactgacaggggatcagccttctgattgggccatcgtctaacggatggacgcgcttgttccacggattctcattgcactagcctctttctttcttttcaacgtttctggggcccaacggaatttcagtccgctggaacttttgtggccgatacaattaatcaccaaaccgagggcattcattgaatccaatatcggatactaccccatgcgagaacccctacggcaaaatccaaaccattcgggccctaggatatttcggcgtttgccctccaaggctatccaccgcgcgggaagtctcgtacacccctttttcgacctcggtagaatctagggatccactaataagcaaaggttgggaaaaaataaagagaaaaacttaataaagggcttggcagttctcgcgttgtcctactggctctgtcaggggcaggagaaacagcactgccttcgatcgcaaaaagcgtaagcactctttgatcatcctaatgacttgtctgaaaattgattaaggaagctcgggatttttcaccaaacgatagggcatgatcagcacttcggctattggaggaaatgtattggactctattttaagcttatttttgtataacgttagacaaacccgtacctaactaggcatcgcttgtaatgtacacggactctctgattgatgacagatgcgacgtgcaatttgctcaatgatcatgattaacaatgagccctcatttttgcgaacatttgcccaatcgtgacgctaccaagaatacgtgtcatttcactcgggggtcgctctggtccgatactttcagctgtagagcattttaattgtccatatcgtgtatgagccctgagcctaggcaagcctccagagttctttatcgcctttttcaatactccataccccgtacttaccttatttaaagttaagttttgaaggcctcggtagggaggagatcggagtaagaacacacgtgatagaattagcacaccgccctcgtgtcttcggacaactcccggttgaatataatgatagcgtcccacaacaaacgaattccatgtgcatgacccatgggattgcaaaactacctggactatctaccttcctctttacgcctatctgtcgcctgtgtacggagtacaactgtcttcacagccaacatgtcaaggaataattatcagactgatatcacatacatgcacgtgacctagttataagggaaaaaaaatcaacgcttgcttttctcttttttcccctgcaaatatattggccagattttgctctcttatccaatttacctgtggcgacatctacaaactggggttggataatggaagctccgtcgaacacctcgctatcctcaccccaacaagtatccttcaacgtcatatcgagcggtttattccgtatattcaaatctagatttccgtcaaatgcctttccggcatcgcttcccagctaggaatggagcgacaaggagatgcgtgatatgatctggacgcgtgatgttgaatttttgttggcaaaggcgggatctgggtgattttggtggggttgcacggaccatccacattcgagcccgacaatactccacacaaaagacgatttcaccgtacccgaagaggactatgtgttggtcgtgggcgacaatgaaaatcatctccctgatgccaaatgggtgggctatgcatacctccttgatgccataacatcttcgataccgctacgagagcctggatatccttcgctgtcatcatggttcgaaacgattgaactgcgctcgggtgtctccaaaactttgggggtaatgaattgcgcaagaagcatcgaaggtgtcgattaaagaggggttaaaagcttcatcaccgagagagagagaacagcaggagtgcaaagatgttgcaaaagcttccctttacactgagtgtcacgaaatattggaaagaaccaagtgaacttgaatcgagtgtgccaaatgaattttgaaacatctctcatatcatgaagtctcaaattccgtgatccaacttcccctattcgcaatgcgaccccgccattgtttccaatctcgctcggtgaggatttcgtccggcaaccttgaatgtcctccgtatacaccaaaagatacacaatttactagcagggcggatgttgattggatcaaaaatataacaatctcaatttcaaatggcgtcaatgccggcctaaatgcatcttgcaggtagttcccaatgaacaatcaccctgcaacatacagccgtgattccgacacggtggagtattttgacatcatcgcttacttttgtatactacagccacgatttaaaagatgctcgaaccctatcgataagatctctcagacggtaatttgatttttgaaaatattctacacttttaaagacgctctacaagacgacttattgtcatggcgccccggtatcaaagcgttgctgtaatcggcgccggtccatctggtatctctgccgtcaaagctttgcaagaagagaatgttttccagaccatacgtctatttgagcgacggggccacattggaggaatctggcaatacgatgacattcccgatctgtttccatcccaagagtctcctagtcaacaagatcatgaaatcccaggtcgtctcccgctgctcacgtctccttctcccgaagatgtaacgtctcgcacaggcatttacgagggccttgacagcaacgtcggcgcaaaagtcatggcgttcacgcacaccccttttcctgagataaattcggcgtcgtcaactagacacttagggcggtccaatccaacccgaccatttggggtggtgagaaaatacctagaagatttgttccaagactaccttcatcttgcttcgctcaatacaacagttgaaagggttgaaaagcgagaccagaaatggactttgacacttcggcaatccggccacggggatggtaacacccccaaggactattggtgggaagagcaatttgatgctgtgattgttgcatcggggcattatagtgtgccctttgttccgttcgttccagggctaagtgccgctttcgcgcgccatccgaccgtatttgagcactcgaagtcgttccgaaaggcagacgattatgtggacaagcgtgttgtggtcgtcgggggcagcgtctcctcggcggatcttgtcgcggatttacatgccattgtgaaaggccctctcgagctgtcccagagagggaagaacgaggcgctgcaatccgcatgggatctacctaacgtcaatgccagaccaacgatcaaagagatccaagcaacgacaaaggggataagcgtcgtgttctccgacaacacccttttggagggcgtggacaagatcattttcgccactgggtacaagttgtcctatccattccttgttccaaatccagtcaccccaaacaaccgggcagcagggttttaccagcacattttcaagatcggggatccatcgttagctctcgtcggccaggtccgcgctgcgatcagcttccgggtttatgagtaccaggccgttgccgttgcccgatattttgctggtagaaatgcagcatccttgccaacgccacaagagcaggatctttgggaggtccaaagactccaacaaaaaggccatacagccctgttccacgaaatcaagcctgacttcaaggactatttcgatttcttgaccgatttggctggccccccagcaccgggaacggggggttacacactccctccttgggatgatcgatgggcagaacaaggattcgagattctccagcgaaaggataagtattggaagtcactacgaagagcagcagatggattaggggtgactgctaaactgtgaagtcagcattatttaccccgtacattccatggggaggaaaatgtaaatatgtcggtcagcaacaagagcgaacgcagtcgatctgtcactctggattatgtgccattttgaagccaagttagcataattgtggtcgcaataagacagcgagggtttaccatttctatttgcgtgctcagccattctctagttctcaaatgctgttttgcagctttcaaaacaccgcggacgggggtgggactgtccattgcagcatgtcgctcatcttttcccttatgagcaatgaatgcagaaacaggagtttccctttgtagtcaagatgtgaagaacaataagttcgatgctactctgactggccccatccgacggtcttcttgtcgcgcgggccggccaatttcccccataagacttagcgccaaccatggcccaatcacatctcgagaattttacatgggctgtcggtcacgaaaatggttggtcttcgcttaactcgttctatagcagatgattacagcgtgcaatcaaaccatccgcgcaaaacaaagtatataatcatgttactcccaaggctactccgtactccgagataaacatcctagcatctccaagtaatccgccatcatgctcggatttttcccttacggtatactcgccattgcttctgttgcagcagcacgcgatcccactgtctaccttattcgacacggagagaaacccagtgacggaggaaatggattgaatgcacaagggcttgaacgtgcacaatgcctccgcgaagtgttcggtaagaattctgggtataatatcacccatattatggcggaaacgcctaagagcagtatgttttatgtcctctctccatgcagcttcggcacaagggctaacatgaacggcacagatggcaaacgtgcccgtcccctcgacaccgttgagccgctagctgaagacctcggtctcaccgtcgacacatcttgcgaccgtgatgatccgggctgtgtcaaggatgtggttgctggatacgatggcaaaggcttggtcaacatactgatttgctgggagcacgatgcacttacggatattgcggagaaattgggagtcaaggatgcaccatcttatcccgacgataggtcagtcttcaactcatatcatagttcacgctcgacttctctaacataaatatagtttcgacatcatttggaccctcccaggtccttacgacgaaataaccgcggagaccagcgaaaattgccccggtttagatgattgagtaaataatgataaagtctaagtagggttagatgctactaatagctcattctcaatctggcttctgtaggaaggccttaacgggttcttttcattattcctatgcattgattcagttaattcatgcattgttttgtaacgtttacagatggttgagtttttttaagtcgagtgcatgaaattccgcatgtacttgctgcacacttctacttcgaaaattactagtttactacttacggatgatcatttcttatgtgtcatactatgaggaaggacctgagcaaattcgagttttgctatgccacgactctccagtttgcttctactgctatcgtgaccatcttcaaaccattattcattattcatgaatgcgtacaagttattaccatcgccggacaatctgacgacctagcgagcaaggcgtctgatgcgaggaacgcgtcctgtttacatagtgaaaggaccagaaacaagagaggatatatcgcatgtccaagttgaatttgaatttgcaatggtttgagcatagagtagtaaagattgcggttgattcatcttggtattaacaaattatggtttgaacataaacaaaagcatgaggggttgggatcccgttagcatttcgcagttaagacatgttcaggagactgtgggggatggtcaaactcttcggaaatattaagagcaattcatcatattggcaaagcatgtctccacgtggacaaagtaatgattctggttccaattaagaaacacgcggagttaatgtaccaagttatggaggtacctattcgacgtgcgaaatggtgctttccttttcattgggcttgggagcttggacggttccttcctctgcgcggaggtctgccactttgtcggactgaatatctcccttctccagcctgcgaacatgcttatactgcacacttgtcttccagggcgtaagaccgggggtggcaaacatgctttcgacctcctccagggttttaccggctgtttcagggaaggcgaagaagacatggacagtcattgcgaagcaaaagactccaaacaatacatagaccttccatttgatgttttcaaaagcgggagggacgaagtaggaaagggcaaagttaaagatccagttagacgacgttgaaagagcgacagccttgccacgcaggcgaaggggatagagctcagggggatagatccagctgacaggaccccaagttggcgcaaagctggcgacgaaaagataggtgcaagcaatgactgccttggcggcctgaggggacccggagagatcccacgactgttcgggagtattgttgagaccacccggtggggctggtttgccatacgatgccatgatgccagcgttggcaaacatgaacaccatcatgagggtagaaccgaccaaaagcggagtgcgacggccccaacgatcaatgaacaccaaagctagcacagtcatcaccacgttgatgatgtactgaatcgaggatgcgataaggttcgagtttccagtgaggccggccataccgaatacataggtaatataaagcatcatgacgttcataccagtgagctgagaccaaatttgcgtgaacataccgaggtgggttcggtaaatcatattacccttgaaaaggtcaaggtatgaggcatccttgttattgcgctcaaattcgaccatttcacggatctcgtgtaattcggcttgcacgaaaggcgcgtttcggtcacctttggcatggaccgacgccagaacctcaagagattcttcccaacgatccttcttggccaaccaacgtggactttctggcaataggaagacgcagccgaagagcagggcagcgggaaccatctgcaacccccacggagtgcgccatgcagcggtgcccttcaaaaagctacagccgtacgagacgtagaacatgatcaatataccccaagtgatcgcccactgttgtgctcccaccacctgtccacgcttactgggctgggctaactcggcgacatagactggcacttgggcgctgagtataccgacggaaactccgttgataaagcggccaacgacaagctggggtattccaaaagatgaacacacgatggcgctaccaatgcaccagatcactgagccagactggatggccccgcgacgacccagatagtcggttacgaaaccagaagctagggagcccacccaggagccaccaggcatggcagctgagataccaccctgagtggaagaggtagggcctccgcattcattgctatcattggtgccagtttggttgaagaaacacttgtactgctgggtgccgagactgccagagatagtcagtgatcatcagcctcaatctgatatttccaaggaatgggacgccttacatggcggacatagacgcgatatcaaaaccgaatagtgcgccgccgatgacggccaccgcggtgatgacatagatattagttatcttgtaacccataactaatgaagttccacaagagagtctgattaaagatggaggaagaaagtggaagaagggatagagggcaagggcgagagattttaaagatacgatccttaaatgaaatacaataaaaccccgaatgggaaaggagcaaactcaaaaatcctaaaaagaaccctgaaaacgcggagatgcggagatgccgggaaaagtgggttccccggcatactacctgcattatacgaagtagattcccactgctgtacagatgaatatgcaaattaatgccagtgagtagagtcagtagtgtagcggggaaatactatagaaggaaacccgccttttcaacttcgatatgacctgccaaagccaaccttggaagcttccgagtcaccaagtcacggattatcggctggatatcaaattagtttgtggtcagatgctagtgagccccatattatatgtaacattatatgtcacctcaagccacatggtatcatcgcgtcgtcggacatttgcctattttgttcaagggtcgtggtagaaggtccgtggatgagacttgctgtctcctgatttggcctcctttgtctcaagacataaaattcaaaactaactttccgttacagaagactgagcactaatcatcatctcgatgagagccgacacgcgccctgtgctgatgtcgatcttggcttatgaaaggcgggtgatcagacctccttgacaacacaacacgcctctcccgccatgatttggtaacacggcacatgcatgcaacgccctcagagcctgtttgtccgaccaagacactcgtggctatagtacgacccgactagcatgcaggatttacacgatactggaagcaaattccaacgctgattgactggtatatcacactgaaccattcttcccaggagctctgctacgttgaacctccatctcatattctatgctcatagctagtatcgccacattgcggttgtggctggatgattgagtgcgccccctacaaagctgtaattaagacgctaagcccacctttagggctacggttaccagattcaaacacgcggtctcggatcaagatcccgaaacaaaggggctgttttcttacgccaactgctgaccactaagaacgggtcgtttagcactcgactccttcatccctgcgccggccatcaatgacgtgggaagaatccctttggggagctaaaatcgggcggaaacaatgcatcacttcctcccgcctctcccttttgctcgacacatgtctaagaatatggtgcgaatacgttccttaccgaattgaaatcaatgacccgccgtctgctgccgtctgctgccgcctgctgatcccagctcacttattagccagcaagaatatgtgatacacctccacctacctttattacaaggctaagaatccatgcagagtccaggatcaacaatccaaatgggaaactgcgtttaactaactggttgcatcaccccctcaaatttgctagcttcagacttagcctctggtatgatcaatccttcctggctgtctagactgtctatagaaggtttgcaaggtcgtgtctgacgatcagactaccagcgttacatttatatcatgtgtggcttactgttccttgtttttcgtccaaaaaaacagcctggtccatcacgtgacccatctgtatcaaggatggaaaaatgacggttttcatcccagattctgacagtgtttctaagcttgctttgatgttgccacaaccgtgtctgataggatctttatcggtaatcttaaaaatgcaataagcccgaggtgctgccacctcaatttagcgcgacaaatggtctttcattaacataacctcgatctattcgggctatccagtggtattcgcaagttaaattgggaccgtatacggtcagccacgcgaaacgaaagccagctgcaggtcataagtcaaatctggatcgtatgagggtcattacaggatagaagccggctgtaagccgtagtacgttagattcggacggactttgcgtcgtttatgggtagttggtacgatctattagatttgattggactactttgtagtgctgcgatgaaagagggaaagattcttattttccaaggggcagaatgcccgactatctggtacggaaggttggcacgggcgacaagtacccgcagtgggcacatggtgatgtttcctttggtccatggtttcgaaagccttgggccaaagtgtggcattccgccctttgaacgaggtccgccattcgacttcctttgcaatctagttgtataacccccatgcactgtcctttacccattcagtttcgtactggggtttttggaggcctccaagtaagacaatgaaaaccccctcaaacaacttgagatatcctctctcgattggagattttaatgatgcaagaagacgaaattgagcctttacaccttgccataagagacgatatagcggagagttggggtgtgtttcccatagtgagggacttttgtgacggataatccgcactctgattgccacacttgatccaacatatattgaaactgtatttccatgttgatatgtttcagtaataactgagagatagatcccatgttcgtcaattgattgggagggggctgggagcgcgagaaggctttccagtgtgatcatttcatctttaaacacctttaaaaccgacttcggtattgctgtagacactatatcgactagccagtcgataaaaactcggagaaggagacaccagaatcccatagtcataggtcgattccccattttccccaggtttactgattggctccatccttggagcctggtaaggacctggtgaattgtattgagaagtcgtcctcgtggctttagtaaatttgaggtatctggcggaagtaatgtccatgtgtcactgtacaacgtcaggctgcgggactgattcgcaatttgggtcatgggagtctctatgctgaagattgaggggaactccagccattaaattgatggaaacatgatggacttgatgggtgtacataccgagtaagcaggatgagaggttgaagaagagaaagagagaaaggaagcaatttctgtgtatatatatacactcccctctatcaatcccctctatcctaactttgtcttataagttaagagtgagacatgcagttataagtgataggatgcctagattcacaggctcttaataacttactacatttacgaaagactatggttacctgatttctcagtagccacaccatggtgttctcctctctagcactctactactcctagtgactctgctctcacacctgtttcgcaggcagggctgtcggtgcccctgtccctcgtggcagggtccctcttcaatattgagattagaaagtttgtcctccccagatccaagcctcattcgactcatattccttatctgccatatataaattcaactagctcaatgttattctgatggtgagtgaatggtcacatgtcctaggtaatccgccattagacccgtctcgggtggagccttgtagtaccctctgtctccaataaacaaccaaacacagccatctaaacagcagtcaaagataacggtttgcatccaataattgaatgttgaaaaagttaacaatggcatagactctctagggctatatgtataaatgactcgagcaccactcgtgtagcccttgcaggcaatctccacggaggggatggccatcgatcatatacccaaggaggaagagatcgagtctgacaaggttgccttcataaaggggatacccagagatgaaaacattgagtccaacatttgcggacgtggacgtacttcccggtccggaagacaatgaccactttgagggaattcacaccgggggcgatgattcatcaccccagaaatgagaagcaaattgcgagatgtttgtgcactaggagattgtacactatggtgtggtctatgtgatccccatgcttgctagctgaccgtcctgtatggttggtgtcgctgtgttgttctcgtcttgcctgcgtggccaggctgcccatcgtgcatttccctcttcaatatctgaatttctgacgcctgtggcgttggggatcaaaatgcggggtattaccctcccggcgtaccgcctacgtgaccatagctatccgtacatatacatagacatcccggttacagttacgagaatcctcatttcctcaatttcctttattccctccgcgaatctcaaatagagcatcttctctttcagaccatgatccactactcgatgctttgctaccaccttacacattagaatcactggtacatccgcaattaaaaattcccgcccgcgatgaacggatatcttcaatgaaaactgacaaccacattctaccttgggccgaccgcggaggaaaagctgtacgcggtgtcacctccccgcgactgttttcaataacaaacccacgatctgttacacgatgtccaactcataagcacccgctaatggcaatggcccagggtgataacccctgagccatcattcccggtgagtcgctggagcatattcacctagctacacattcaagatatctctgggtccgaatggaaccaatactggataaataagagtgccataagacataatacagcattagaagccggatgtctagggttgaaagatcattgacgaaactggcggcatccgcgggggctaacgtcgaaatgcccgaaagatggcagcgatctgttgatcaacgagggacaccagacattgcattgcgtgtcgctaacatggtttagtctgagagacagagactctgaggttttaacaattttgtttctgcttgccttgctcttgtaggtgcgtccaatgtctcaggtcgatcctccgttctctcggtcaccatcaccgagcccactcgggctgattcaccttcatcatcgtcaatttttatattcccatgcctctcaatatacatttaatatcttcccaatagctactactcgtggcctttattccctctggggcgatgtagataagaaccgtctataccttaaaacatagcgccatgactctatgactaggacaccatcttcagtacagagtatcgtcgcctgcaccaccgtgcacctaggtggctcttgggctgtcaatttctggcgctcgaaccaaacacttcccgccaatccatgggaaattgtagagaacgtaatttccttgggatctgtgatatcgattaatgaatacagtcggaattagaatccgaaaaagcggcaaactttcagacaaacggaattaactcggtttcaagatgtggaaacgataaaactttgtagatccaccgacttcggtatggtgccctagcattggccggataggatcaaagtttgatcttccagaagtccgtaggtggccaaatctgcgataaaaattgatcttgaatacaatacttgagcgttgctttagtccgtaattaatttcgtggttatattcttcgctgtttacccgcggtattcagtttggcttaagttgttgaagttatccgaatgtgctatcatggacttgatacttcctaatgacgtacttctcttgataggagagcagctggaacagagagcagaccgacggaacctcgtctttgtctcccatcactttcacaatcttttcctcccactggtatatcgaaaggcgtccatctaccattggcaaaatgccaattccttcctgcatgcattactgcaacgacctgcgctggcgcgggccgttcgggagctagacataacagactggcatgcaagaagcgtatcggaagatgaatgcaatgaaattcggacttcagcatctttggtggcatggctaggtgctgtgtcatgctcaacgctcgaaagtgatcaatgggcccaaagtctcgggcaaggcctcgctgacgcctggattgcgctcattctcccattgttaagtcagctaaggaagctttcgctggcctatacgtcaaagtctccttatttggatcagatcatgcaaagggctgtggactgcaaacagccattttccgaccagccagccttccggcacctacgcgaggtctcattgcaccaccgggaagatcttgatcacagcgagcacctggaaagtgggactcaactatcatcaactctgctcctgtcatttttccaactgccgtctgttcgtgctatcgcagccaactctgtagtggaccctagctccacaagggaaccgacagattatgagaagccacgccttgccttctcctcaatcactgatattgatttccgagcaagtagtgggaactatggcatggagatattggttagttcatgcgcagaactgaagtcatttaaataccagcactcggactcgcacatcctttcgcatggttaccagccatccgccttccatcggtctttgattcacagcaaaaaaagcttgcaaatactctggctggaccactatggaagccactacccgttcaccgctgctggattgaaccaatcccacgatgagtgctttggctccctcgtcgaattcaccgccttgaaagaagtgcgcgtgagactgccaaatcttctggatattcgataccagaacgaaccaaccgtgcctctcatggagtgtctaccaccgtcacttgagactctgtatattgaaggatgcgaggagcgatatctgggaatgttggtttcccagttacagagcgtggtcaaaatccgacagactcatttccctcgactcaagcgtgtcgatatcgagggtgcattccaaaacatcccgtcggatgacgatggtcaggttgccagctccgaatcagaattacctgctgtgattaaggacaaaatatatcaggctgctgaacctttgcatatagactgcgtcaatgctggtttggagttgcatcttcacgaccgtgcactgtcacatatttgattatctctctctattcattagcgaactccaggcttgcatattccaacatttgatttgacgatagataccatctgaaacctctttttatatagacctgcctcttattattcacgactatttcaatacagactgagaatttgaacttttagatcattggacagacctccgacagacctcccactcttcattcccaattcaagtgcttgataggtatcatgccgaaaatgtgaattattcttaacgaatacactgacccaggccgcagagcgtgttcgaaattttatattgtgtatttttgtaggccaacacttcataaagaaacacgcttctaatatatcatttgcgattggattggaagtgatcggagggtattctatggtccgtgtacttaaagggaagcaagaaccgcatcggcaccagacttctgtagagctgttagcatcatacatcgctaaaacgaaggttaaaattccataccttcacaacacccctttcggtctcgatctgggcatagccgatcttaccgtgatcgataacgatcgcatagcggcccgtacggcccgaggtctcatcggcccagccaatgctcttagaaaacttggcatcgggatcggtgaggaagagctattttacaaaatcaatacaagtcgcagaaatgtgtggggcggggttgtgctgctcactatgtcatctccgcggactccgttcgccttgccccaggcactcataacgaacggatcattgaaagcaacgaccgcgacaatgtcaacccccttctcacggagcttgggcaggttgtggatatagcctggcacgtggttgatagagcatgttggggtgaaggcaccttggttcacactcacgttaacaaagtccgacttcagctacagggtgagataaacatcaacttaccgggaactgagaacaggacaactttcttgttggcccactccttcgaggcattgtagtcgataggaatgccgcaggaggtaatttcaccactttcctcgctccatggaatgtacctggaggaatcagcatcattctttgcgggggtcaggatttacccacttgaagacaacgtcgctggggaatgagtcgccgggcttgagtgtagtcatattggaattattgtgaatattagagatgagagatatgtaagaaaaagttgaggttttggaaatggcggggtgaagatgtctcgacgtcacctgtgcaagctgattaatatgtatgaggtgatcgcccggcggagctcgccgacctcggcatccaccctcccttgtctgggctggtttagacatgaatgaacttggagttttagtgataaacattatgactcaaatgactgtacgattgatgatgagctatatagagaaaggtgacaggtcaagctcccaaatttcccaaataggcaccggatgagcccgcgtggggcttagtttagatatcgagaagcgttgaaattttgggtttgagaggaacgatgcaaagatgacgccgtgaaggggcgagcgatcctcagttttctttatacattaagtttcagacgagagccgctttcttcttctgataagtctatgtaaggggaaagtgttgtacaaatttccggaaatgaatccttaacacatgcatgccatgacagccaactattttttggtgttcttcacggggtgtaagaacatcggaggcaggcagagatcactatgatcatgctttccgtgtagtgtcagcaaatttcaacagaaaaatcaagggaccagcgaaaccactcacgtcgtctgcaccatcgtaacctagccaagctcgataaatctttccggcaaattgcgacccatacatgtatgatatcttcatcatgatatcattgtgctggttccagttccagatactattccgcccagcgctgattttaccaggcttgcctgaattagctcggagattgagctcaacaggacttgtttcgtgcgcatggtaaatgggttgaggaatttgaacggctttcaatccataataaagagcccaggaggtagggcccatttcagatgctagtcccagccctttctcagtcgtatccttatgcataaggcgaagtaatcgcgccgagacacgggacatcgcgacaacagatgcccgccgcggagtgcttcccctctgccggaaattatatatacggttagtaagaagccaatcagtatgctgagggtcgaattgtggcagccaggtgatcaagtcagcttcctcgcccacgccccagctccaagactcatcttccatatctgcgcgcggtggctctggtgcttcagcccaagcctcgatgccttttgctggccgtggtccccagatactatcaacgcctgtcatgctttgatctacctgatcggtaaaattttcccagttcccgtggatagcgggcatatagaagtaggagttgcgctcccatagattcttgcgacgctgttgttttgcaaactctgttgcctgctggagaaggtcgtagaaatgtcccgtataacgtgaatccatctcaaactgccagaaaaagtcgtattgtgggttcaatcgtgagaaaatctgcatgggctgaaagtattgaagcatggctctaaagatgggttaacgtctcgaaggtactatagagaggatataaatcttactcgtgaataccgatcattgggtaccagtcctctagtatctttgagttgaagaatactgccagatcccggagctctagcggaagagactttttaagactgtccaagtccgctggataaggcaattcagtgtctttcgcatcaaccaagaggatcacctcatattctgcgcctgataagagcgacagctccattataatcgaccggatataataaagatcatcattcgtgtattccatgtcgagccatgtgcgcagaaccacccctatccgtggtttgaagatagcagaggtatggtctcggtttgtctctctcttctctctctcatgacgtttcgctgttccttcctcttgctccctgtgcagagtcgatgtcttctcgcgaatatccgaaggttgataccggtctgcattgcgctgcaaacagtccttttgcaaagtggcccaattcacgtcctgccactgtactttgtgtgtttgatctccgtagccgtatgctccatatcgagaatatcggtcgacgcagaaactccaattgagattccacgcctcgtacgatccaaatataggcgctggaaattctagaaagctatcagtgcccaagtcaaatgcgccagaataggtttggctcaattcagacctgactgattccagtgaaatcctttcatcgctgtttccgcgtccctacgatccaggactgaaccatttgggccaacacattgctgataggttcccttccacgtgttgttccattcgccgctgttatattcaggatacgggtcgtaaggtatggacgatgattcgtgcgaagttttcaatacaagctgaccgagaccacccccatcataagcaggccctgagcctagaaaaaaggcattttttcgactgtaaaaagatgagcgtgttagcgaccgggtcaaagttcgctatcatgcgatttggacgtcaggacaggtgaaaggacataccttgaagcatggattgctaaaggttgttcccttgaccgaggtataagcatgaaaattgtaaatgcaatgacgagagcgattgcaacgagactgcgctttaaagaagtccggaataagtgccggcatttttgcacaatggcgtgcattttcaagacaggtggtggtttgtaggaagtggtttagtcaatattcgtcgtcatggtagtagtgattcattaataattagggatattagagatgcgataaccagttagagcgagaaaaggaaaaagaaaaggaaaataaaaacatgcagttcctacttcggaatccagcggaaagattatggcactaaaactgcatcttagacccgggggcaacatggggcaacatggggcaatatgggggttgcagtgggccagagatagattttcaagagcctcgaagctctaagtgaaccatgaccatcccaaaatgagttcaatcttttgagactaaaactgctcatccttttgctaattgtgcgcctcttcttgaattgaacgaagaattgtggaaacaaattactaaatacataaaacgaaataatacacgctagtatatattagtacccactagcacagcctatcctaatgataatatccatggataagatctcaatctctttatagtacggagtacacatatagtagccactccatgcttcgtacctagatgactacgatgtatatgtagaggagagatcataacgcgattatatgaaattgactagaatagctaattcagaggaaagggacgctgtctaggacaaactgggacacgtgactacgtgccctagcatgtacatacatacctagatagtaccaactgtcgcccaactccacctagatttagcgtggtatttaactcggtatcttaacatattcaaaccaagttaatatataagagcagctagcatcattaacagttatataattagtcggttatcatactaactaactaagaattagcagattcagagacttgtatatcagaagggaggaatttgagaaattccatataatgcagcctgcgggttcagtactgaaaagtgagtggatcccacatatcacatacggattttgccatgccacttcttggaaaccaacttaaagcgaggtaagcctcgtcaagccttgtcgtggccgctttgagccctccgcagtatttacaatatccaagaaacagtcgcacgataaaatcggattaaattatagatttctcccttattgtcgccttgaaaattacttgaattacgattggaacattatcgacatcaaatcgaaagatgataatatggaaactccagaatggcaaattgtggcattcattcttttagttttcaacactccagatgcaatgtgagcttatcactgggcacgggcacctatattcctgacttctagggtgcatatccggcttgtcagtcgaacagcccggctccggtcaattcaaaaataccccggtatcctagcaaagcatcacgcggggaagcacggattgtttcatactacattttctaccatattgaaatttatattctccattaggattaaattcatggaattggttggatattgactgtggaacccaaattccacagatgctgacccttgactcccgcaactagaacccagaatgtataaagctgcatctatcctgcatatctagatgtaaaagtactactttgcaatattaactgggattcagtcgactgatctagaggtcttggctacattggatatcatgttcgaagaatccattcaaggcaaaagacttcgccttcttgcccggctgagttgctctttggtgtgtccacccacatattgatcaagcccaatgagaacgacccctaattatattgagccaggcctttcttattgagggttaccaggctggaattctcggaggagtgcaagataccaaaccataccgtgatgcactcggagtaagctgcctccaaccagtattgtatgttctctgctgaccttcggaaagaaccctgaaggggcggagataatcccaatgatcgcatcttcttacacactcgcagctactgtaatgtccattgtggtggttgttgtggggatgcctctaggccgccgaaattcaatcctactcggcacggtgttgatattcttcggtggcatcattcaggcagcatcatactcggtagcacaaattatcgtagcccgggtcatatgtgtaagtctgtgccctttcatcgacgtgtcccgaattcgaaattaacatatggctacctaacagggttttggtatcgcggtaagacaagtgcagcttacgagactattccatttctgatgtctctcgcagtttattacatgcaatgtccctatgtatatggtacgagcgtccctcctcttgttgacaactacaactgatctgatgcaatgatctagtctgagatgagtatccatgccaatgagcgcggccccgaggtagcgatcaactgctcttcgctcctcgcaggtatcgctttatcttactgggcggactttggattcacaagaatgtcaaatcagctatcctgggtaaggttataaattctcgtcgctaaaactgggaactaatagttgaattgtcaaagcggttgcctgtttccatccaatccatatttgctctcttttcagcagccggcattttcttctgtccggactcaccaaggtggtattatgcaaaggggcgaactgctgaaggcgatatcaccctggcaagactatacaatgtctatcgtgttgacaatagtgctcagcccgagagtgcttccatggagcttgtcagagctgagattatgcagaacctccagcttgaggcggaacaagagaaccgactcagctggctaagccttgtttgggacaacaccccgctccgtgttggccgtcggataaggatatcttttatcatcctatccattcaacaaatgatgggaatcaatatcatggtttactatatgccgctaatattttcgaacgtcggcctctcgagctttttatcgtcgctcatttctgctgttgcattgacagtccaatttacaggctcactggtcactattcctacaattgagaggattggccggcgtcgaatcatgctggttgcagctgccgttcagagctgttgtatgcttgttttcgtggttttgaatggtcttcctagtaagacggaaaagacccaatgggcagccgctgctatgatgttcccatatatgttcatgtacggctggggatgggttacctgtccgtggtaagcattcaaagctgtcaaatttgcaatgcataaaggttgacacttattctaggctatatggacccgaggtatgattcttcgctgtgctcggcacgcctaatctgacttgaatatccccagatcgctcccctcaagtatcgccacatcggagccgcagttggcctgttcggggagtggctattcagttttgtgacagtaattgctggcggcatcgggctcgagacatccggctggaagatatggatttggccccttattttcaacgtgctgggttttgtcttcgtctatttcatgtgccctgatgtgagtgctctaccatcgaagcccaagagagcgatcttgctaactcaatatcaaatagccgaccgggagaactctggaagaaattgacgctctatttgacacggacttcagattaccacacacttccgacgagaagttatcagtgcatcaaattgagaatacggcttaagtcatcaaatgagatgcctttggaaagaaaggcgagcttgtacatgtgacgtcgcttttaatatgctatctaaaactcgatattcgaatatccgttgtaccagaaccaatatcctcgtgcgttgcggagatgtatatgtgggggattgtatcagggacccccccccttggttgttccaacccccctttggctaataggaccttcccagcccgagattttaggtatcagttatttctgccgtttcttgtattttctgccaggttgcaaagtgggaagcggcttgcttatatatggttgacctttacaaacgttgcaagcttcgaaccttcttgctgagcaatcgcaaatacctatataaacaggaataagcaagcaaataactatgttgtatacaaatcgtaggaaaggtggccaggaaagcggccaaaggtacggtgagcctttatagtaggcggtcagtttatgcctgaactatcgggcggattgcattagccaaggggggtccttgatacaattccctacatatatatggacctattattcccctaccttagtagagatcgaggaaatggatgtttagagttttttattcaaggtaccatttgtattggtatactatacaaaaggtaccttattttgcaatttttatcgttcagcgaaaattatcgttgactggggtaccagtgggcgcctaacacgattactgtttcgcaaacaaatggtattggacacggcattaatactagtgcaaaaggagtctctcaactccggtatatataattgatcatattcagcagggttcaaaatatatgttctttttcatagcttgtatttgtgttcatgtggctctagccgtcgtattacttgtgcgatagcactcttacgttcaccgcgactttgccaaaacgccggaatggactttgtagtttcgcataagaggcgaagagcgttgattcctctggaagcatgctcctccggaatcatttgtcctggttgattcagtgatgcattgaacacctcaagcgagattgggcctcggtacccggtgccaagcacagcagctgcgacaagctcaacaggcatatatgcacctctagactgctccataggatatagccgatgacttcgcgaccatggaagcagtgctggtgtatctgggtcagttggaggaaggaaagtcgttgggttcatcaactccgcatcgccacactggaagaaaaatatccgatcacccggtaccgtcgagaccaatgacgcgagtgatccggtaaggacttctagagattcctctaaggttgggtaaatccgcccgtggccagcaacattgtacggatcagcaaactcgacggcgaggatattgaaggcatccacgattagtccaacgttggggcggttggcaaatcgcaccacttcccatgaggccgaccatgtgtttcgagtcgcccaagataggccttcgtacccaatttttaacattcgcccaccgtcagcctttgcgtatgcggccgccatgtcgcccagttccgcgagatctcgtgccactgtcttgagatcagatgtcacacccttatccgcgcgaatattcgcacacatgaagacgagatcggtgtcaaaggcgcgcatgaacggaaaacgtctatgtagtaggttagtatagatcgccgctatgtcattatcgaggtaaggtatatctcacttggcgactagatcgaaggtagcctggcgttctgttggatctttgattccttcaattttccgaagaggctgggtgcaagcaatccgcattcccaaggacttgacaagacgagccaacttttgagcaatctgcagattctctgaagtgggttcccaaggctggtctcctggcagtccatgttcctccaggtatgcagcccaacactcatcaaacaagtcgatccattgatatcccgattcagccgcggctttcaagcgtggttccaagcgatgctctctccagttgccgagggacaaggtggcgatacccagtgggttggctttatatggaggccaggatactgtcatacttccaggtatggtagcttgtatgattttttttgggtaatgagtcgcgtcaattaatacaacaaagggatgcgaatatctcgaatatccaacctgagttgatgccacctccacaaaccggtgtattttttaatgcaccgagtggggtagtctatcattcttatgaaggtgtacagtattatgtattaatcaatcaaaggatttagaaggattcagataacaattgattgatattgttaaagttttattgaaagtgccccaagcttaagggactataaggtcaatgtacagacacctaaacgaatctcaagttcccgcacaaccaatttttcaactcaaggctcttcaataaaacgaccgttaaccgcatgatatccttaattctacaggaactagatatgtgacatgtctaaaacaggaaccgggagtccgtccttggccttcaaagctgtaacaatagcctcgcagacggagactgctgctagtccatcctcggccgagcaaataggatcttctaagtcacgaaccactctagccaaatgttctgcttgttgttgaaacggaataccctgggcgactggaagcttgacgcgtgtcattggagttttccacccagcctcttggcgatacctgcccgtcgtctccgagtcgtaggtccaaagagtgttgtcggggacaacgatagtccctttcgtgcccaaaatgctataaatatccactgggatctctgcctttggatacaaaggattgtcgccagtagcagactcccaaccgtatgggctagccacattgtcactcaccagaaatgtgccaacaactccgttggaaaattgggccataatcgctgccccctcttcaacgatatcatcggccgccacaatttcgtgtttccttctgggtatggtgtttatggcccatacacatgtcatcctggcacctgtgaggaaatgaagggcatcgatatcatgcacaaaattcgtccaaatcggccctcctccggcggaccgcgttgcccgccaactagcagaagtaaaatagccttcgtctttcttcgcagtccacaatcccgagatagctgtaatcttcccaatttttcctgtttcgatcaccgaccgtgtagttgacagcgagggatggaatctgcggtggtgtcccacaaggattttgcaacatttttcatttgaaagcgcaagtaactcggttccagatttcgaatctgtacaaaagggtttttcgatgagtaaggccttgggacgtgctcgatagatgacatctatcgctatggaaacatggagactcgaagggacgcatatcacgtaggcctctggtggcttttgtagcgccttcaaaagtgatgcaacagactcgaagtgcggaagagacaagctcgacgccaattcgcgtcccgggtggtacggatcaacaattgccaccagttcacatgttggtgaagacataagatgcttgacgtgcaaaggagctatggtacctcccccgataagagcgatgcgaaccttcgggctttctgccatactgaagacacaagacaactgtttttggattcacgtagaaggcctatgaacctaaacaatgtggggattaaacattcattagatagaagatatatttcacagtttgatcccggtcaatatatcaaaatgccgacaaatatgaatgcggggtcatcgaaattcccgtaagttgtcttcctagattcgttggtattattttcaatgatttctctcgttagtccctccaaccctacttctggtccatacaaacaccaaatatggatatcctcaagcaatcttatgctcacggcagctccccgttaccatcgaacgcagcagtgactcagtatcatgtctatctttttggtagtaatatctccaaatcactatcgcccttgatacactctatcctatttcgcgccaactcagcctcatgggaatttcacctcagccagaccactgacgggaacatattctggaagcaattacgtgacaacacatgcattgggaccacaatcacgatgccgaacaaggtgtcctttggcctcctactcgacgacttgaccgacgaggcacgcgttattggggccgtcaacacctcattcgttcggcttgatgatcgtggacagagaagatatatcggcacaaacacagactgcatcggtattcgcgattctattctctaccgaatgccccaagcggctgccatggccaaaggccgcccgtcgatggtgattggtggtggaggcgctgcgaggagcgcaatttttgccctctggaaatggtttgggtccacaaagatctatgttgccaaccgtctcaaagccgaagtagatgctttgatcaccttctttcaatcgacggcaccggatatgacactccaacatctcgctactgttgaggaagctgcaacctgcgaggctccttatattgtcatcgggacaattccaaacgatacaccaaaagaacctggtgaaattatttgccgtcaaatcttcgacaccattttgcgcaggaagaacaaaggcatcgtagtagatatgtgctatctcccattgccagtgacttatttgtatacaaatggacagcaaaatggctgggcagtcatcccagggaccgaggttctagtgcgtgtttgcatagcacaacatattctctggttggagaaggatgtcaataaacaaggagtggaagatgcgatttcagctatctggaaagttgtaaatcaggggcaaagtggtccaaaggcttcgaagatttgaattggatttttagcgttgagactttcattgaatactcacctactcattcttcattctattattttctcctcccttggcgtaaaacaagtatgcatctcatgaagtgtgcgcaagtggagatggctgcgggtgtcatcgattccttcgagatagtatagccctttaactaactaggaaggagttgatgcctagatgccttatcttataatggcagaaaaattctattggcactcccacatagctcaccgccactataaacatataccgcctacctaaaacgcgcagtatactagtatagatttcatagtatgaattcatggagtttttgaccggcaatatgttagaattaatcatggggtggctaagggtgcaaaaccttatgtccagtcgctgtacggagtacatatgccttaataatcgaagtactcccgaggtctggttcggagagagagcttgccagccacctccaaaaattgagatgcatgaatttgtatggtgccgaaagcttcatttattacatggatcatttatatttgtatagagcagtgtaaagagcggtgctaatgaaggcattcagggaccaaaatgcttcttaaaaaggggtttgaacgctggggtatcaaaggaacaaaacaaaatatacatgtcacttgaagattttgactcgtagtagcaatatttacctctggtttcgggcctaattccgatcattagtgcgactgtttccccgcagttgtgattgaccgggtgacaaataaatagcccggttaactaggtgaggatatcactagatgctacaagatatagagcggaataaaggcgcattatgtcccagcgagagaacttaaatttctcttaaacattttttaactttgttgctgggtctgtatcaccatgtctgcatcgcacatctcccctctcgctcaggtatgcttctctggttaaaccaaaccctcgatgagactttctaacaacaaacaactagcccattacgttgaaactctctgggaaagtaatccgcaatcgtttatatcgcacacctctcagcgaatatgcttcaacgtatgacgaaaacaacgtggagaactgcggcaagcccatggaccgatatgcagagctatatcaaagtatgatcgggactatcataccaataggactagtgctaacgagtacacagagctagccgatggaggcgcggggcttatttgcactggaaacatccccattcatcgcgacaatctcgaaaattacaacaatgcggtgttggatcccaacaatccctgggatccggtcgcagcttttactcccgcggccaaagcagccaaatctcggggtgcaatattcctccctcagttacaatttccaggacgtcaggttccggaattcctgaacaaaaatcccaagtcatcatctgatcagcagcttgaaccttgtctcaacaaaacgtatggcaagccctcgccgttgacgaaggctgaaatcaaggatctcatttcgcgatacgtgtgggcttctgaggtccttgcagaggctggtgcagatggtatcattgtgagtgtttgaatctattcctgacttgttatgaaaagctaaatgaggcgtattggtagctgcatgccagccacggatatatcatgaatcagttcctgtcgcccaaaatcaacaagcgaacagacgaggtatgaatgttaaattcctctcccccttgcaatcaattaatgctaatattgactaaactttacagtatggcggaagccttgaaaatcgggcacgctttattttggagatcgtcaatgcgatcaaggctaaacttccatcggacaagtttgtgatagcagcgaagttgaactgccaagattgttagtatttccatcccatattttgaagaaaagcctaatgggaagatatatgtagtcatcgagggaggccaaagctttgctgaacaatgcgttgtgataaaatggctagaagatgccggtgtggacttttttgatatctcggggggaacatatgcctctcctgcatggcgtggcaacatcatgactgaacttgcagagcgtccatcccaaaaacagcgtggaaggtaaatgatttcaattgcttcactgtttttatatgctgactatgcgaagttacttcattgagtgggcgcaggagttgaagaaagtgctggtgagtatattacatgttttctgcgacttgtgatcaaataagctgattgacaaatcactagtctcgggctgtgattggaactaccggtggctggcgtgatagccatcgtatggcggaggctgtggaacgtggagacatcgacatgtgtggtctgggtcgacctctccgagaagatcccgcctttgtgaataaggtgcttcaaggggaaattcgcagaagtaacttgtaggttgatactcagtgatctgaaacagtcactgtaacccacataatatattcaatgggatgttaggaatcccgcaaagaatcatattttcttctctttttttcacttataagatcactaagaatgtacctttgacccttcatgcagacttttcccatttagttcatagaagccattgtaaaatcaatgctaacctgactgagaaatacatggtttatgaaagcagtagattattgccagtcattggacactaaaaatgcataaacaatagctatgcttttcagatttctatttgccaaaattgttaaaagacggccccaaatccaggcccgaacatttcccggaagaagtcagcaaacccctcatcatttagatccccctgggtagaaattgacgctgtagtcaggaaaggatcgtaatccgagacgaaagcctcgtatggcttcgaatggggggacttctgtggcataaattgactcgcttcgttatcaaagtctgtactggtgtacgacgcatccgttctggtctggcgaagttgactttgggctttcagtcccgccgctctggctctcagtatcatcatgaggtgttgtccaagtaacgctgcgattccaaatcgatgcggtggagttgttcctgcacgttctaattgaatggcaagttggctgagtaaagcaagaagttccacgtcatttccggcgcgggatccatacacggtgggaaatagcttcaaagccaacacgccggcgtatgatatcatagcccaagttggggccaacatgcaatataatggctccccaatatgatgcaaatcgcgcacggcgacctcgcaagaattgactgcagcctcaaagcaatccagtcggattgcatccatattttggtcccagtttatggaaccgtgaagggcaaacgacaaggtccaaagcctcccgtggagataaacataatggaggaagatatgggataacttttcagacggcgatgtgattatatcgggcattggatgtgacagccaaaggtcacaccacggcctcagagttgtatcaaccatttctcgtacccaatggggatcaacgtgtgtcaaatgagcttgattttttagttcattttgtagtgatgctagaatgcgtcgcaaggtgataaatgcacatgtgtgcttgtctgtagggtccgccagatgatgaagccaccagctatcaacactttgtgtcaagtccgtttccgggaatgtgtgaattctaccgcaggctgcactgttcgcccgttcccatagtagaatccttagccaagttctctcgcgatttcgtgccatgcgttgattatcggtgtgatcctttggggggtactccagtaataaccgggacgagtcctctcttgggagtggtgctggggctgcatcttgggttcggtaataggaagcactgagcgtgttcagaggtgtcgcatctttggcactagaatcctgatctaggcctagttcggctgctacaccaaaggcatacattgtgtagagccatgagcgttcctgtgacagtgtctctgcgggagtggccgataacaatgagatatagtagccttgaacgatttcaaccgacttatatccacaagtatgaacgtgtttcgagagtttttcgccatgaaggcgtaatcgctttgcgactgatgctgactcatgatcgaattgggcagttaaagccagtatccaggtgaacaaaagagccgatcgtgaacgcacgaaatctggtgtatgaagcatcggatctaggattccgttgactggatgcaagcggctgaaatatctagaattaatcagtggatttatattgacagtgcagttaatatttggacttacattggaaatagataatagacctcagccatggtcaccaaaccaaggtccactgggtcaacatcggggccaacatcgcgtagaggcacttgaggagatgacttgaaatagttcgagtaacggtatgggtgctcagaaggaccgagcagagcatctattcctgcttcaagggtgtctctgtccagttgtaggccaagtgacacgtagcctggccgatgaagcagttgccgacccaggcttgctccaatggactggctagccgatgactgtgaagtagaaggtgtttcgtttgtttcacaggaagtgttggcagacattgactgtagctccaaagcttgggcggcgtcggaggcatctgccagcaaggccaaaggattactgattggttcccggttggcttgagagagttcgccgctgcggaatacaggagagacaagttccgctagccgctgattctcttgtatagctggcagagtcgagttaaaacatgacgcacaagagagttcacttcctagctctggtgatgttttggtggggttggttgtctcggctgagtggttagagaataagagctctagaatcggctcttcgcttgcgacgaaatcatccatctcatgattctcgcccgtataacaggtttttgccttctttaattccgactgcattttccgataggctttttcaaaaccttgatagcgacctgtcgcaccgcgcttcctcccaagttttctcggctctgggatattgcactcgcggttggtacgcttacatcgttggcaaggttctgtcaagttgtcgccctgttgctccctttgtgggcggatgcatctcatctgaaaaatattttgtgagtaagtatgtatatgacttggggtcaaggattgtagggtataccttcattttccgacatgcctcacacgcggccgcgctggcgcgagtttggccagaggtattatcatccccagaatatgatgacattgaggctctaagcatcaaataaataataggatcgaggtagtcaatggaaaatgtttgtttgatttagggagaagagagagtgtggagaaataacaaagaaccccggaatttcaaaaactgcggggaaattttcggctatgagataagttataactctacacgcctcgacctccgtccacctccaatgtcgttccagttacaaaactgctctgctccgatcccaggtaccatgctgcattggctatatccactggctggcataatcgcttcattggcaacgagtcttctacttggcgtagccgctggcgggaatctgcgccatttcgaatgctagattgaagccttgttcatgttaatattgacctgggggttgatttgggtcaacatacatcgacgtgtttcccacagcaggggaaatacagttgaatcgaacagctggagcatactcaagagccattgtcttggttgctacctaaaaacgcgtcactatctggcgcatccaagagcttcccgtttttcacttacttctacggctgctttggaagcgttgtaaatggcaaatcctggccgagggcgtgtacaacccgtgctgcaccagtcaataacttcataccagaatcggattggctgacccacctcgttatgttgataaatattccatgtccctgctgcatcataacaggcgcaaagacctgtgcacttataaaaaccggctgtataggtattgtcaagctgttatccacccacagcagctagggcatcctactttcacgttgacattgaaagtcttctcatattcgaggagactcttcgtgtggatgggctaaaccatcgcattagaagggtgatcgcattcatggagggaaacatacagatgggtcattggtaattcctagttgggctgagtcaacaaatcagatcgtaatgttggctctttggaatgttctcaccagcattgttgaccaccacatcaactctaccatgggttgtctgtgccaaagctagggcgttctgccatgtctctgggcgagtcacatcgccaaggagaaattcgatattctggtcggctcgctgcttactttcacctttcacttgatccaaatctaatattatgaccttgcatccctctcgactaaagcgatccacgatagcagcaccaaatccatcagcgccacctaagaaaaagtcccagttagtccagagctgaccggatgggatggatagatgaacctgtaacaatcaccacacgtggagtgttcattttcgcacgaagaggcatagttcactcgatttattttcgtaatatgggcgttttcttccgctcaattttcttcttatgttttaactgcttaaatcggtatctcatctcactatccccgcacttcgctcactccaccggcttcaaatttggtcaccggaattccctcatctcagatatctttgcattctcgcatcaggacaactcttctatccctgttcggccttccctggttattctgaatttccagacaacatgacatccatcaaagttgcgattgctagtaattcgctgggcaagtcgacttcggggcatacacttcttcataaacttgagacggctaaattgcacggatttgatggagtggaggttgcgatcgagtgtcttgaagcgcatgcttcctctttctcccagtcttctcgagcttctcgcctgcgtgcagctgccactcatgttgaccaaaaagcgcaagatttatctttatctttgattgcgctcaacccatttggcgcatacgatgggcttgttaaccctgtcgaagttgagtctcgcctagaggaggctgagctctggtttgatctttgtcgattgatgcgaattccaatctttcaggtgcgcactattgacattttgatggctccgtgtcagactgaccttgcttttttactgtagatcacatcgtgcctctaccctatcgatcctgttagaattacgccggaggtaaccacaatcgccgcgaacatgaagcgattgggtctccttgcccaaaaatacggtttgctagttggatacgaagcccccgcctggggaactcacctcaacacttggcaacaaatccatgaaatcatcaagctcgttgatcttcccaacgtttgtcattgtcttgataccttccatatttctgccaaagaggcaggtgatccatttagtgctgtggctcctattcggccaggcggcctggcaaatttacgccgatccttggaggaaatgaaacgaactgtgacgccaaatcagattgcttattttcagttaagcgatgcaatggttgctgaccagggccaggtgggctaccaacggcgtgatctcaatcaacccccctatatgacacaatcgcgaaactgccggatctttccctgcgaagcgaaccgtggaggtgtgcttcctgtacttgaggttgcacaagcggtgtttgatcttggctacacgggatgggtgtcgatggaagtatttcatactgatatgtggaatacgcgctcctcgtaagtgagatattcaatgagaatgaccttttctcttaactttaacttgtgtatagagtacccgacgactgggctcaaagaggaatggcttcatggcgagaaatatctttccactgcgggcttgatcggcataccaacgggaggttgtgaaaatattgaatgctatgtaagataacaatgttggaatcatcagcacttgaaacttaagtactacacacaatactctcatgtgacaaaaagcatattcaaactattaatatctatagaggattaataacaataactgtcgaccttccccttggtaactaactaactaccgcttttgcccccacgcctccttctatctaccgcgcccataccgccttataattatatacaccgctttcgtggcaaatagtaataagacagtagatacctgcaatttgtatgtaagcctctaacaaactcaagtcacttttgttatatcaactgcgccatcaaaaatgcttcattaatacctggggctacgtcctacaggaatcaggtagagtacacgactttttctaatcaacatgcatgttttattactatgtaaaccagaagatggcagaatacatggcagaaaaaataaagcgtggcagaaataggcagaattctgagcgatatccgatcaggaaggcggggtcgatagttataccaatccctatatattgaatgtcaatataagaaattgtatgtatttgacgtttccaacttctaagctctgctctttttaatttcttgtctagattccgctaccatccctcatcattgtctagctttgctcacatggaattatattcagccgtcaactgtgaatgagatatctgtgcggagtatggccccgcagtggtgtccacccggtcacttaatttattcgccggcgccgaggcatctataagtgagtatcaaactcgaaaatataaccattatgttaaatattagtcacttgctctgatgaagttttcaagaaatagttcttcttccgtttctagcccgacatcaaccatatccacaatggagagaattcaagtcgatgtcctcgtctgcggggctggcatgtctggaatggcatgcgctgcttttgcggcggaagcaggagccaaagtactggtcgtcgaaaagcaaggggatgttggtggttcgtcaaattattctgcaggaatgttgtacgtgattgaatcaatcttcaagccaaactaggttgttaatacatactgtcaacggacagctgggctccacagacatacaaaaaactgagagactgggtcccagaaggagatccagaattacaaaaggcctggttaagcgattatctaccggctgtacagtggatgcgtgaaaatggggtgccaacagcagaccggttcgacggcatcatgacaatcggtaaggctaaaagaaaaagaatttaatgaacagtgaccctgacacatcataggaattggattcccaattaaaatcccacaccttcataacctccatcgaaagcgcattcagtctagcaagacacgttccgatattttcaccaacacgtcggtggtcaagttgattcagaaacagcccggggtttcagggtcgagcatacttggcgctgtcatttgcaggaactcccccaattctccagctaaatattatgaagtccgagccaaaacggtggttttggctacgggaggtttccaaggttctccggggatgacatcccaatacttgggacaaggtggagacaacatttttgtgcgctccaatcgtggatcggtgggcgatggacttaagctggccatcgaatctggtgctgggactagtagaggaatgaatacctactatggtcatcttctggcagctcctcttcgagccgaagacgtgaatccaaaggactatcttccactcgcccaataccgtaagagcaagtccttgtcaactcagcatttctctctaatcagtctacagaaagcaaatactgcctactgttgaacgaggcaggtcggcgatttgccgatgagaccacgggtgacgagatcatcaatcagtatctcgccaagcagcaaaagcgccgcgggtttatattattcaagtatgtcccagacagaaaaaattggggcgaaattctaacctatggcttactattctagcgagaaaacccgtctccaacactgcgtcactgcgttgttccctaatgcaggggacatcgatcgtctgcagaaagcccgcgaacatggctgtaatgttggaagtgcgtcgacattgagtggtctgatagatgttcttcacgcctggggtgtgaacaatgtacaggcaagacggactatcgaggattatgaccaagtcgtgcgtttagggaacaagagcatttcccttgacgcacctattggtcgtgcttgttctccccctgcaccattggtagatggggaaggtcccttctatgccatggaggtccagccgtcgtaggttatatcttacacagtccagttccacctatctaatttcccataggatcacattcacctacggcggtatcgcgatcgatgcgaaagggcacgccttgacccccgataaatccagaattccaggcttgcttgtcgcgggtgtcgatgctggcggcttcagtaatctcggatacgccgggggtcttgcactcgcgttcgtcacaggactatgggcggcccgagaggtcgcacgcgacttggggttgcctgagcctcgcctaccccctcccgaccttcgagacggggaggataaaccaatccaagggcgtctttgagctagttccattgcaggttgcatctagaagttgacctcgttgtgattgcttttgatcaaaatagtattgtgcaaatctacaacatacactaaatattgtgacgtcgggtggctcaatccatttctatcaaggtcctcgcctttcagccgatgaatataagcaacgaccctcccattctctgcttccgatcctcttatggtaaaaaactcagttcaccattgatgtctggggcgatcaataagtgattgaaccctctcagtaggtacggctctgttgcttctctctcccctccccgtccccttgttttctaccctatcggaaagcttacttctctcactgaactctgacgtgtttccaagacttttactacttcatcacacatatggtaactatacacgaacgcgaccgggcaaccacttcatattcatggtatattcaatcatttgcatatattctaaccgcggctttagatacagacttcgcctcccaaattcttcactcggatcagaaacacccattgggcttttctttttccacatcgggatattctatggtgccaccaaaacgccgcgataacgcatttttccttcttccaatgtcttcaggctttgtttgataccatccaacgtcaaggggaaggtcatcttgacaggtttgatgttgtggaatgaggcaaattcaagcatatccctgtggacctgtcttgaagccacgatacctccttggatccgaaggccattcacgagcagcggcatatatgggattttgagatcgtttgagtcgacggacagaggagaaatgacaccactgggagccatgatactcaagtacattgaccaatctggctgactgctagtcgtcacaatgaggttgtcgataggagctttgaccttcaactccttcacacccttagtcgcatagaattcgccggctcccagcttgatcgcctcttccttcttgctgtctgtgccggagaagaccacgacttgacagcccatctttgcagcgaattgaatagccagatgtcccaggccgcctactccaacgataccaacgcgagcggttggacgaacctgcgcgacatggagggcgttgaaaacagtcgatcccccacacatcaatggtcccgcatcttcgttgctcatgttgtcgggaaccttgaacaaaaaggcttcacgccacaccgcgtgggtaccgaaagacccttgatcgagatcggctagaccgtacatttttcgcttgctgcacaatgtctcccacccggtgaggcattgcttgcaagaaccacagcagtcatgctcataaccccaacccacgcggtcgcctttcgtcaaagtcttcgcgtctgggccagttgcttccaccacacccgttccctcatggccaagggccatgtcggctgactggtagtgagcatcggtgccgcacacccccgaatgcgtggttcgtactaagacttcgtctcgtttgaggtcctccagctcagtctccgcctgtttgattccatccttggagcccctgtatacggtgaatttgattgtcattgtgggaaatattgatgcaagatatttgagtttgcgaaattggaatttattgatgaaggaatcagatgtttacacttatcagcccacgagcctgctttataggccagcccgtttaagtacgtcagtacccatatttcataccggaaagtgaacaaagcttgtgtcatcacatattcagtcaagagaagcaaaacaagttgatacgattgagtgggcctcctgagtcctggtcgatgagatgggtagtgataggcactgatagcaaggcccttttcccctagacttccttgatttgagctgaaagctcgatgcaaagagttcataggtcaaagctataaaactctcggcctcgtttatgtatcccgtagcctttcctggcttggtcaactttacagacttcgaaggactgaaacttgatgacatcatacaggttcagcgtcaccaacatagcatatggtcacgtggcagagcaaacatccatggatgcgattacttcatgcccctccggatgcggaagatcttgtaaaatgttcctagatcctagctcgctcttcaacaaacaatactaaacctcgaaggaaaccattctggcggatttaagggaggacatatagtattcgaaaagctcttgaaatccatagattcgagagctttgatatccatatcatggaatatcctcattgagatcccattttgaaggcatcggcatcttcaactcagttatcgatgatggtactccgtgctaccgtctgggcaagtgattgacgctcttctccgatcgtcgctaattctgccataatgcaaaggcggtaatataaggccacacgcgatatcgggcatcccgatttggaaggtacgaagtctaaataacaaattttcgctcgcctcacactttaattgttgcatatagtcatattcaaaagacatatagattcttccctctgcaaagttcagggaagccatcttggtgggacaacatgattcaggtccatggcataactagcgccggtgaatcaccccacgtctcgtccgaaaaagatgcagctttggcggtagtgagcgagttcgcccaagaaattgatccggtcgtggaaaaaagggttctgcgaaagattgatttgtatttgatgcctgccatgcttataggttagttatacgcttcatatccgtgacatgggaattgttgactaactcgaacacaggctacggcatggtgtactatgacaaggtgcgatgactgcgccgatggctttgttagccaatatatacttatttctcataggctatcttaggtagtgccacgctctttggcatgacgaccgacttgggattgctagtgaaagactattccacttctcctccctctgctgatacttcacggctcagctgggcaacgtcgatcttttattttggaatgcttgctggcctatacccgatgacatttatcttgcaaagatttaatactcgaattgttcttggtccagttgtcctgacatgggccattgtctgtgccgccaccgccggtgtgacaacctggcaagggctttttgttcaacgattcttcctcggtatgtgaccttcaatttcttttactaatctcttatctaataaacgataggctttatcgaaagtgttattcccacgggcttcatgaccatagtcagcgggtggtacacccaagaggagcaggctcttcgacaggcatggtggttctctggcaccggttggttcactatcatcggtggcgccatgaactatgggtttggccaaatcacggctggatcattgaaaagatggcagtacatctatattctggctggtgccttgacctttttgtttggcctctggtgttgcaccatgcctaattctccggtttctgcctggttcttaaccctagaagaacgaagggttgctgttgagagactacgcaaggggcaaacgggtgttcggtgccagaagatcaaattcgatcagatcaaagagtctatgatggacattaagatctatctagtggctatcatgatggcagcagcgtgagtttcgtctctcgttataccaccctaataacaattaggcagcatacattccttgctgttaacctctctaaatataggtacactatcaatggcgctatctcgggctttgggccgttgattgtatccaccttcggctatgatacgcttcattcgattttattccagtttcccgtcggcggcatttgtgtcattttcattcctctttgtggttatatccctactgttgtccctaatacccgcatacacttgctcatcgtgtgctgcctacctgttattgctggctgtgtgatgatttggaaatcccaatggggatatcatccagttactccagttgttggttatgcgctaactggcttctttgggccagtggtcagcctggtcatcacaattggagctagcaacgtcgccggagcgacgaagaaaaccgtcatggcagcaaccgtgtttgtggcttacactgtcggcaacatcatcgggccgcagcttgtgaaaagcaagactaagtcacagcattatccagaactctggactgggatgatcatctggtaagtccgtaactgattcttcttgttggactactctaactaagtatagctactgtatcacaattgctgccgcagtcgtgttgtactttgtccttcggcgggaaaaccaaattcgggaatcattggaattggatgaggtgcaacgagacaagattgcatttgacgatctcaccgacaagcagaatccctttttccgatatgctttataatgacccttccatctacgagatggagactcatcgaaatcgaagctagaatttctggctgctctctaacactacatatctgacactcatatcacgtgcacatgtcctgtagaagataccaaaaaagtccaaataacatattcaaatatactcaaataccttcagttgaattggaactgtcctgaacgtacatagttcatcaagggtccctggcttgctccatatcctttatattcaataataaacgtacgatgtgccgatatgcgactccttgcgaaagcagatagtaacataacaacctacaaactggaggattagagaaggattccaaatattatgccacatgttttcgatcatcattgggctcgattttactactatagagttacaggaatgttgcaatattctaacgcaggttcggtccaacactcatgtctccagcatatttaatccaactcgggctgtttcatgatcatacgtgataccaaattccgggaattaaattcgatctaagataggctaggtgtattcgggaaccaaagagaaaaagaaagcacaagtacccttgaagcactttatgacttgcagaaagtggtagccatcgcatcacttgcaccactacctggctcccaaggcctcctattcgttcgctatgttagttagtcagttagtttccttcattctaactggtcaacttccatgattatttcttcctttcacttcgccctgagcacatatcctccttgcatagttcggtcggaatcaaatccccacccttgatgcaagacttgacaaggagctttgcatctcctcagctgaaataaaattgtgtgtaacaaggttcacggattcgaatctgttcgaattacagtccctcttacaatttgatctagaaacaggctccgtattagtctgtcggattgcgaattcctctggcggaactgaatgtagtttggatacataaaaaaagcaaaaaagaacaaaaagcccagccgatattgggtataaaaatatgtacaacggaaaataaaataaatgatataagacatcccaacgctcgaatacccacagtaccaacaaaatgagagaaataagaagtgtccagaagatttcatcttcatgctatagctgggacttctcactcctatgaacaattgtttcatgaacaacctttattccaccctggctactctggctctgtgacttccagtcgccgtcgcctgcggtgcatgtaggcggttgctgtcgtgaggtaggcaagatcatttgctcgtcgctgattgtattccattgagtgtctccgggaatcgatagcggatggcggaacttcttgcgtttggaatacccgccgccagtgtcggcatctgatagatggtagccagggtaactctctgactcattccttgatgtgatgtacagaccagcacgttttgtaaatcgtcttatcaatgggtatatcataggaatatttccgatgatgacggcgacgaaagtctcgcggcaggcccagctgccagcttgttgagccccatttgcgccagcctggtgaactgttagattgtgttatcccagcaagtaactctcaatacaacttactgttaagatgagaacacaacgcagaataccagccatcatgacaaagaggccaccactaaaaagaaccaagagctcgagtttttcccgccattttagtcgggctttaacaagcatcttgatgcatgtgttgttagcaacattagacaccgatgtttagagcgaggcttaccggtgctggaatactaattaaatagaggtcggtcgcgacattgagtaccacggtcacatagatgtcgatcttggacacggcgggctggcagtaatctaacgaatagtcagagacacggtctctcaggatgagaagatatgacacacttccagggtttggatatatttgccaattcttgtccattggatgacatccgaagagaattgaacaaaccgttgcaatataagttatggcaatgagaacgtaggcgatatggattcggattcgcatattcactaatcctgcgctaaagggtaggatatacgtcagtgacaaaggaccgaatagatgcaatcgaatcaaaacccacgtcaatcgagagtagaaaatggccatgcatgttttcagcaaccataataacagagtgtatagtgaccagccggccacctggaccttagagccgcccacacgcaggcgatattcttccgaattatgcgacaactctcttcgctcttcgtctgtcatcgcattattggcaaggcccatgaaccacgcgccgaccatgtacgcagcaccggtttctagcccatacaccacctgtaccccatattgattagcaagctgaaagcaaagagaacccaggttccaattcaactcacacatgccaccagcattagataatcatcagcttggaacccttttgggccaaccataatccatcttgcagttgttcgtaggccaattacggtaatggctacccccaacaaggtgaacgcttcggtattgaacccatccatagttgacgacttgcggtgatttcttcgggcgatatgccatcaaatttaaagaaaaggaccattcaacccagggtgtacattcagataaaggaagagaaagtcaattgtaccgagggggaaacgagcggcagaagaaagtatcccaatgatctcctctggcctcgctcgttgttattggaaccagaccggataaagaagcaagcccactcgttagtccacttatcaacaccaacgaatagaagaaaaagcaatgacagtatcgatctcaaatatccgttggcctgcttacttattgtggcgcccattaaactgaactgcaaacgcagtctaatatggaaatactctcacatgtgaacggaatttatgataggtccagttttgtcatgcaagagtggcagcatgcacaagtctcattggacagcgatggaatatcatttggtgctgggcccgggctatgggtcctaactgccgggggaaagttttaaggttgaaagcaccgtttgttccacttctagattactggtttttggaaatgtagatcggcagtcaaaaggtccacacatcccctgagtcgatataactttccctaagtgggaatgatcgtagcaaagggcgatttttcgatccaatatggagtaccctgatagacttcctttgtctgacctgagagttttttttttttttcggttacacacgaatactactccgtacggtcccgcatgatatcaactgggccaatgttgagaagcagcaataaaccgcaatgcgaacggggatttgtttgggttttcctgcgatctatgacatgcaaacagaccagctcagagacatacggagtagcgcagcataaagcttgcgtagtttagccaatcatatgtatgccattaggggaagatgccatacaattttatacccagggcaaatacggagtatatatgtatcgatttctctaatccacattctcttttgggttggtttgattgctgatcgagccggagattgctccgaggatatgtaggtgccaggagacttaggactagcgggctctcagaccagtcatatatatccgatcgatgccgttctttctataccgcgtcaaatgagtccaggagatatcataagtactgaatcaggccacggtttccggcacggattatggcttgacagcttccatttatccacggagtaataaccttaaccttgtgcataatctcaaacgacatgctactgtatgtttcaaattgaaatgtatgacatgttgacgatagcggtcttttccgacttccagcgacttggtgggtcccaaaacgggccgttcgatgttcatccgattctcaagcgacaactatgagccttgtactctgtactccgtactccgtacactgctgtattgttgtcaaataatttgcatgagatcaatcaattgaattggactacgaccagtagtcggattgagataccaaccgaaaacggcaacctgcatattgttgatcccggcttccacaaaattggtaatccaaacgccagccacggggtttccaccgtcgaaactatttaaaatcacagtggagtttggcttcacctcgctacgcacggagtactccgtactccgtagttttcttatgaaggctaggatactacctaagattagaagaaccgacgatccccgtgggcctggccatgctttgacagacgctttgacagcagggctaaaatagtcaaacgacggagaatctaaaagattcagtgctgattcgaattctcccgaagagcccctgacactgaaggggtatcggtacatctcggtacggagtacaaagtagtcaagtgcatgccaagcactccgtagtaggtagtctgttacccagatggggcaaggggtctgggactaggttcacgggtagccattatagaatcatcagcttagaatctctggtcctttaaatgtctcaggcccttttgaaccacgagctctgtctcaggaggtacaagccatgctaaagttggcgggaactgacaacgtcgtggggtttttaaggtgagttaatttaatagtcccaccattccatcctcccgggtgtcctgaacagcaagggctaaaaattcaaaacccaaaaaaagtactactcgacgctaatacttttagttatcgctcattccttcgtttccagtaatttggccgctcgtcttgtttgcttgtacataaagcatcaatcctggtcgcgcaatcggtttattttctgcctcttaaaacgaaaacaagggagtcttcaacaatggagaccgtggatcttgttgtggtaggcgcaggtaagttgaatcttcactgtcgcatactatttcgctgacaagcattggccaataggttggagtgggctctccgccgtcaagacctaccgcgaggtcaatcccggccacaatgtgctcttgttggaaactgccagctctattggcggggtgtgggccaaacaccgtttgtacaaaggcctcaagtcgaacaatatgcttggcacgtatgagtatagcgacttcccaatggacgaagcgacttttggcatcaagcctggacagcatattccgggccatgtaattcaaaaatacatggaagcatatgtacaacattttaactttgccgattgtattcgactggaacaccacgtggaaagcgcgcgacacaagttggacggaacgtggcagttaagcgtgtcgcacggagcagatacaacaataatcgataccaagaagatgatcgtggccaccggcatcacgtcacaggcatacatgcctacgttcgaaggccaggagtctttcggtgcgccgcttttccactgtcgcgatctgctgcagtatcaagatgcagttctgaaatctggagagcgcgcaaccgtttttggcggaaccaagtcggcctgggatgcggcctacgcttgcgcaacggcaggtatgaaagtagactggatcattcgcgaatccggtcatggacctatctggatggcgcctccctacgtgacgcccctgaaaaaatggctggaaaagcttgtcacaacacgcctgctgacctggttcagtccctgtatttggggagaggctgacgggtatgatgggattcgcagctttttgcatggtacctggctgggtcgtaagattgtggacgcgttctgggctattctggccgatgatgtcgtgcagttgaacgagtacgacaagcacccggagacgaagaagctgaagccttgggtgagcccattctggattgcttcctcgctcagcattctgaactaccctaccaatttctttgatttggtcaaggatggcactatcaaggtgcacatcgctgatctcgagcgtctctcggatcacactgttcacctgtcatcgggcgatgcgctgtcatcttcggcgctgatatgctcgacaggctggcgttgcactccaaacctcaagtttctaccggaaggcattgaccgcgagttgggattcccttggagtgtggatccgctgaacgaaaagctgttgaaagcggcggatgaagagattttgcgccggttcccccgacttcgcgatcaaccaaagccgaacccgaactacacgccgttagacgcgcagtccgaagcggctgtgccgcaccccttccggatggcgaagttcatggtcccactttcgctggtaaaggaacgctctctggcgttcatgggtatcacgatgactatcaacacaactctgattgctcagactcaggcactgtggatctcagcctatttcaaaggcgatctgaccccagctacacacgaacgctgcccactcgctgtgcgtgctacgtctgacctcaagacggaagacacttcagaaatcgaccttgcctgggagacagctctgtttactgaatttggcaaatatcgctacccgggaggattcgggcgacggaaccctgacttcgtgtttgatgcgatcccatatattgatctgatgctgggagaactgggtctgtcaccacaacgcaagcacggcttgttggcccggtgcctccagccatatggtcctgaagattaccggggtctggtcgaagagtggaaagctaagcaaagaatccagtaatgttgcgggtgtcgtgattcatttatttcattcatttcatgttgtctgatgtgtactagtttgttccccttttccccttcgcgtgtcgcaagtgtctccaagacactcccggttctttcttttacataagattcaagacaatagaatgatgttttctatactatgtgtgagtatgttatatgaacatgttataatattctttgataatgctcattttcggcatcatccaccatgacaaattgctccaaaaccgcaacaccaacgagacatgaagatgaagatgatcgtacatcacgttccttcgggtcaccacctccggcccccattggacgctggctttcagactcaattacctccccaaccatgtctcccgtccatctcatataatctttcccattccccgcgaccaccattcttactgagacattaatttccaactgaccatttccctctcccagatcatatttcagtcggaatccttccggtatatcacctatccgaggcggatatcgcccaccagtagtctccggactacccatcggtctcacggtgagaatagcggggtcacaggcggatataagcagctccccatctttggcaatgtagctgctcacataagtggcgttgcttgggtcattcatggcgagataactgaaccatacgatcgaatatggacctagacggccgtgaccccagtaccagctctggacagagtctgtaaaaggttgatcagaccaattctgtaacttgatcagccgaagtttcacaatttttccaccaggcggcaaaatcacttactttgtcatggtacccaggccctcggaacttcagcgtcgacccatggatctgcatgtcgacctcacccatggcgtcgggtatgagattgatccatccgatatgaggtgcaatctcaataacagtctggccctcttgaattccacagggcagattatacggtgctcgctttttggcaaatttagcaagctgtctgttcctgcgattcgagtcactacataccgaagtcaaggtaaaccgcccttcgacctgaagcttctccgacgcgacaataatctcatactgcgatagattctctgtgagagcagcccagctaaatcccgtcgaggcccactcgccagagctattggtgcccgcgccgtcgacgccagtcacggtcgccacggtcgccgggacagaatcggcaaagacggtgccgttggcgaacgaagcccataaccaaacattgagcacggaggtctcatttgcatcgaggaatggaaacccttccgcggatgaggagaagaatgtgacgactagggactcatcggggttggtctccgagacggcatcgaaataccaccattcgaacacggtgccattgattgaatctatctggggtgcatctaacctggaaattgattctttatcaagagtggtctctggcgtaggaatgtcaaaccgagccttgctagttccattttgtacagtgctggggatatggtaggtcccgctgcgagagtccctgccagcacggaggagatatggcaaatgtctctcgttgaccctatgctgactagggaatgctggtgtctgttgtgctagaagagcacatatcaagagcagtggaagcatgatggaatacacctagggaagaatgcttgatgatggatctcaactgagaaagaatttagtctacccactatcaattgggggcggatgggaaaagagagaaacgaggtgaaatatctcacttgcataaggtgccaggatgcagcagagctgatccccatgtgggcttcgccatatatagcaaaaaggggaaagcagcgggatcctgggggaatcgattcaaaaagtataatttcaatttccatcccaggtcaaagagagatggcgatcctttactggtacggagaatccttctatcgttccttggtttcgtgatggcccaacacaatgatgtctattttagtttacaatggggatctatacccttttccccgaagacacaaaaataggaggtcacaagatccattcagtagatacaaatccatcttagacagattcactcatacgcgttgtctaattagaatgagacagccacgtagctacctagtgagtggctgagagaaatcagcatagatctaacgaacttccttatttcaaggatcaataggaaatagatagccaatgatgattgacaaaaccagggtttgaaagctgttttattaaataaattaagacgattaatatacttcgattggaattcctcgggatatcttccatctcataattgacgcaggggtgtttatataccgacattgcccatcccattaacatttcgcttaatcgctttaaatcacagagaagcaggatagatacacacgtcacacatgagtctgataagcacatatagtaaacataaatccggataggggaaaaaaagggataaaaaaaaaagttcagaccttcccatgatgcccaaatcacaaacccttcgccgaagctcgaaataaaagaaaaaaaaaacacaaatcaaagtcaaatccggtaagaaccccgactcccaatgccttggtagatacatacatgtcttcaaacatcacccccataagatatgcatatagggagagttcacagcaaggacgaaagtgtcacaggcgggaagactggaacacgttcaacctcgtccattaaggaggggactgccgtcttcactccgcccttcaccctttatatcggccccggtttggttgctattcgcatccgagtcgccgtcctttccgcagcctttcacaagaatatgtcgctgtcggcaaaagtcagtatgtgggaattgtcatatgagactgcagatgacataccttaagagcatccttgcgcgagaagcttttgtcacaatgcgagcaagggaaaggcttcacggccaaatgaatacgtttatggcgcttcagatcgtgattacggttgaaactctgggggcactggtcgcatttgaacggtcgatctgccgcgggggctgccatgccgtgcggtggtggatggcccccatatagatgttgagagctggcgacatggccactgttgaatcctggtagaagcccggtttgcattccgcccatcatcgacatgggcccaccggggctgtgcacgttggtcatgacgggaccgttcatcgccgggagagaataggagggccatggctggcggggatatcctaagggcggttgcccggctgatggactgtgaacaggcattcgtcctggtgggtggatgccaagcccggtggggccatacatgggagagaagccggcctggtgaggactgtgcataggaggagaaacggcatacatatgctggtgtttgggggcatatggatcgttggattgcagtggagcgggggatgtagcgggtcccgcatggtacatggtcatggcaggttgtgacacggagggaggcatggttgacggggcgggtaaagcttggtaagataatgtcggcccttcatatgggtgcggcaacccatccgtcgtcggcggcgatattaccgatgagcgctgcataccggacgacggcgagaaggaacttcgagccgagtatggatttaccccggatccccaggactgtccgtatggattggcggctgaccaatatgccggcggcagctcggaggacgcgcctgtggaaggagccaatggctggggtgtggcgtgttcccctgcttgaattgtggcgggtggcgttagtaagttccccacgctcacattcactggcgcgtgggagactgggggatgggtaggatgtccgtacttgggtgctgccgcgccagcacccaacgtgaacgggggaggtgggagctcaaagctgggtaatgttggggctgcaggacgacgaatgttcaacggcggggctgacagcgcgtctaacgctggccccattcccgccggcgctgctagagtcgccagattggcggatgggtccctcactggtacgtagaattcggggtcgttgatattggagagctggccgaaagaagatccgttcaacgcccaatctcgatcgccaggtacggccccagaagggctggtagaatccaggaggggcgatcgtcgatcgctggggctcgcgatcggtatatggaagagagtcgagggactccggttctccaagaaataggggaatttccggagggactagagaactctcgaaataaagtgacaatggtaataaaagaaatccgaaaaaagacacgggaggtgagattgtcacggtcgacgaaagcgcgtgtagtacatggtctcgggggggagaaatgagtgaaagtcgaaacactaagaaagtgaagctgagaggaagagagatgtggggggggggaggtgggcaaaggaccgtggcgttggaggcgatagcaagcgcgggggaagtgttatactaataagagatgtcaggagttgcctaggtataattaacagaagaagcacaaaagtaaataagatggatttttctctttggggaatggagtcgacgcgggtctagccaggtggccaccgtggggaaaggaatgggataatgaaaacagtcgtatatattgtatattaaatagaaaagcacggaaaaaaaagggcgaaaaaggcgagcagaggggtgtcagcagaacgtggttgacagctaactaactaccggttggcttccagggctgttccggattgtcgactggaatttatattatttgtcttgatatatacaatccagggatttggtttcttcgtgcctactttctgttatcaacttcagaacaagatagcccacaatatatgtatactacctatttgatagctgaaaacccaaaaagacccttcttcctcgagggaaatcccttgcgtccgactgatcgcgtgaaaataaatgcgctagtgtagggactccggagagaatctgtgctagcaaaagagtggatccggctgagagaaagaaatttatttcgtttgggaaaagaaaaagggaaaaagggaaaaagaaatgggatccatacttttctactatcacggtaagattcccatccaataaggagaccaacatgtcaacgcacggacaagaccggaatggccagaatacgagaagcccatagagaaggcagaggcaagcgagcttgtcttgccggtcattcgttggaaaaaaaaaacacatgatcgcgcaattcagttaagctgctttttcatatttgtctttttgtttgagcatccctgttataatatacagcctactcggaccagaggtatattggagaccaaaccgccgtacctaggtatggtctatgttgtctatctctggtctgcggattatggtcagctgcacttcttttttttgccctttcagcccccaatagccaaactaaaagctcgatttgattggtccccggagttcaccggccgtggtagcttctttcgtttccctcgttttggctttttcgctctttttactttggttcgggccttaaaggtcacctcaactctcccgacctctttccgaaagccaatcgcctccagcatccactccctcgggtttccctcgcccatagatctatatagatactagtagtgcttgggtggcggaacgccaaatgaaacgggtctcggctccacgcgagaacctcgcttcagtctcccgacagaacatgtcttatcctccaatcaaccgacagagtcatctctttcgctgccttctgcacggacgtggcagatgcttatgtagggggaaaaggggggacatgccctgtcgatcgatatctatcaccgtagccatacgtactctgaatctacataactagacaagacatcaaacttgacagagctgatctgccgtaaacaaatcataacgtggtcagattccgaagacgttgtagatatgtcccgaatactccgcaggggccggtggttccatctatgcatagctggttccttggcacagcttagacatgtccattggcacatggaatttcatattgcgatccggtccgcatttcccccgtattcggtagcgagctcggtgctctcaaaaagaaaagaagaaaaagaaaaagaaaaggggggcaagtcttagacacgcggcggagtcacattcttgggaactgcatacctccgcctaggtatgtctagccgacgacagacacagcatttctccattattgtacattctacacaatccatgcaatatactgacgtttgttagacaatcccgatttatcttcgattcaaaaataaagtccaccgcgtctgtagccgcacgtcgcctgcccgaaaaggttgatatcagcgacgatcggttgatcatcaacaacctgtggccccatcgtatgctggttcccggttgatcggcctcgcactgccttttctcggtttggaagtgcaatccctggagctatggttcgcagccgattagtcgatcctctcatgcaaggcggctcctacagtccagatgcctctcccgatgtgacagcacgcaaggatccacctggctggttttgaacgccttagtgtcgcctgcattcggctcttgccggcgtggcttcggagaggctcacggttggcgttcacgatcgtccccgggaatggcgtttcgtggaaggttgactattcttctcgcccgggagatctgcgaccatgagtcttcctgcagggctgatgggtacaatatcccggcctcggtggatttgagggctcacattttacggtgtttccaaatatatcgactatacggagtaatgtgctgatatataggtctcaacctcaacaaagctaatagagcactggtctctccttctgtttcaagggctaggatcactgcttcccaatcagaggctaagctagagcctccctgtctcagcaaaaaaaaaattctatgctttttttttgctttttatctctctgtgggaacagcctcacgagcatttttcggtcgctgtaaaatctttccttgccgcagatctgcttgcattgtgttgccttgggtgtgataattaacaagagacgttaattttcgcatcgtgttgctctattgatcataaacttgaccgattcgattcgctgaccttatattagtctctcatggacctcataaagctagatttccggtatgacagtctccgcggtgaaacccttgagtggtctcattaagacctggtgacgtttgtgatacttgtaagttgttccctttggttgactgcaagaaataagagtttttcgctacacaggcccactcagtaccccagcttttcgagcatgttatctaactggaatgtgtaacttaaatctcattgtcaaccatttgtgctacttgtcttcggtgctgtatataaatgacatagaagcgtcggccatggtccccatatatatttccataggtcgattacccgatcgcataagagaccgaccaaacaggccagatggatcaatctcgggaattaagccaggaatagaaaataatatagaagacaatctaaatagccttgggatgttctaattgcatcgggctttgaattgccgagtgttgctccgatgacgtcgaacggcggggtacaacaacctggagtttcattcctacattcacagggttactttcttcaacttcgcttttaaatcaaaagccaattactcgtatgttcgtttctcgtccaaatcaccccaaatgaaatacaggccatttctgaccttccaaagaccattgcttgcaactaaacaccgctttaacacacctcccttccattgcttctccacaaacatgtctggaatcagcaaagcatgttgctcgttcgtgatccccataaccattgcactctgtgatgccccaatttcgcgctgactatcaccgtgcacagaatccctcctattgtatccaagggctaccaggccaaaggagaatataaaaccatcaacggcctgaagacctgttggttcttgctttcgccgacctcttacgattgagctaatgaaattactttcagatgtcaccggcccagaatcggccaccaaggctatcctggtcatatatggtaagccactccccacaagaatttcaacctggccattaactgacacaattgtgtgatctgcagacatcttcggtttcttcgaccagaccatccagggtgccgacatcctcgccaattcgaccgaccaaaaatatcgcgttttcattcccgactttttcgagggtagccccgccgacatctcgtggtatccccccaccacccaggaacacaaggagaagcttggacacttcttctcaaccaaggctgccccaccccaaacactctccaagatccccaatgtcgtcgccgaaggcaacaagctagcgcctggcggcaaattcagctcctggtcgatcctgggtttctgttggggcggcaagatcgcctgtctgtcctccggcgctgataacaagctattcaagacggtcgcgcagtgccacccggccatggtcgaccccaacgatgcaaaggccgtgaacatccccatggtattcctggcctcgaaagacgagcccgcccaagacgtcaaggactttgaggcaaacttgaaggtccccaagtacgtcgagactttcccaactcagatccatggctggatggctgcccgatcggacctggagaaccccgaggtgcgcaaggaatacgagcgcggatataagactgttctcgaattcttccaccagcacgcgtaaacaacagaaaaaagggcatagttgactctggggagttccttaccgcggaggtttgatggtggtatgcgaactagatttgaatggagaatgatgtcttatgacaaaccaaattaccttcctatgcacaggtacacatagcgtccttctagtgtatgcacaacaagcataagccgtataactttgacaaaatactattattaaaaagctaaccttgaaacaaatctcgatgactcatgtttgaagatacataaggtgtaaataaattacttgggtataacgacatgtagccgagcatatgtaatttaactagttcgaacataactatgtacgtatacatttgatatcgcatacggagtacgtccggagtacctaagtaagatatgtgcatatgtataactaagtaaaaagtgttttactttttcgaatgacccacaacatagttgcactttgtacaatccgccagtcttccaatatcggccaatcatctcattcgcggatggcacctagacgggtgcccaggtggatataagttgtatatatatgagtccgcaagacgtcatcactttccgaatcttaccttaaccttcttaatcttcttaaccttcttgatctccttgatccccttgatccccttaagctaccgttcctttattttacaatttaattctgggatctataaattctccgaagtcgcttaagttgtgcattcaccccccaaaaaacggcgctctcacctgtcgcgtttcagctttcagcgtcaccccaccagccgcgaagggcggagatcggcactccgcatatacttgatttatttccacttcttaatcttttacttttaccagggcattctatctagaagatgcgataattgcatcttcacttggttctaatgtcttccatgtttggccgccgtcgttcctcagatgcagcttctcctcctgctcacaatgagtttgagtcacttaagcgatcattatcgcatcgccctcccgactctccccaagaggatcatcccaacaacggggggttccgaaacctatttcggaggcacattaatagtccagacataacttctccaaccgcaacacaagtaagaatgtcttaactattttgtcattagaactgttagctcatgcgaaacagggaaaagaaaaatcaagtccaattgaggcgagcgcgccggcgccgcccaaatccccagaagagagtagtggccggcacgatgacagcaaagatccccatggcccccctaggcacgactcgcccgtaacaggggccgagccaacgcaacctggaaatatccatgatcatctcgaatccagattggagatggcgggcaaaccaaaagaaaacttgcctgttgcccaccacaatccaaaagaggagactaaactcacggcgaaagacatcaaggcaattttttctggggcacctcactttatgctggagagaggcaattatcatttgtggtatccccaagtgatattcccatgggatgatcataacccggtaatccaacacatgtgggatcgcaagccattaccccatgcatcctttactctgagcacacttcacgctcatctgccgctcccagacgactgggctatcaagggtggcgttccgatcaaagtccttgattggcgccaaacagacgctaccaacagggcaacgttcgacgtcggcatcttcgaagtacccaacatgctgtctaacaatggcaaagaacctggaaccgtcggtttccggcactttctcgaattacctgtggccgacaccgtccgatacgtgggccccgaaaagccaaagaaatctccacatctacagcaaatctcgaccatggcggcaaccgtggcgtttgatataatggagggatatggaaaaccctattcgcaatgccgaagcggtgccgtccacgatcgacataaactcatctgcgaaggccccgaggcctggaagcgcattggagtacgagatatcaaccttcgaactctggtgcaacgcctagaacatctgcgccagtttcgacatgagatgctcacagaggggtcgacaaagacaattctggatattgaaagtccgcgcgagttgcacgacagcttacacacacaattccttcacccccaagctgccgacattatagggggtcatgcgcaaagcatcaaatcccagatcaaaactttgtcaattgtgctggccaccccaggcgcatggatcaatttcagtctccccgaatggcgctttcgcgtagggcaggtcctatgggaggcatccctgcatggcgatggggactgtctgggccccagttcaggcgatgagaaagtaccgtgggatcttatgatcaagtccgggatggagcgaaagtggttgctgatacagatgctcctctcggccgagttgcttcttcgcttggatgcgttcgttcgagctggcatgttgcgtgatgcgcactctggccatatcacgatgcgcgagcttggagaattcgagaacttgcgagacggcaaactgaactgggatctggttgttgtgcgccggttcctcagcagcctcgatatcagttgcccgccgccacaatcagggctatctccggatggctcacgattgaaactcgcagccacgaagtcgcatcgtttttcacttttcgaaaccatcagtcgacatagtccgccccctgttgcggatctaaagtccgcctgggactgtgaactgagctcttcgcacattcggcaacaactggagggtctgtatgtcttcgcagaaaacgttggatggccaaaattggctgcactgaaagctgccatggagttcaaacttggagaccctcacaatccggttctgccagccttagtcgttcatgataggtggggatgggaggagatatctcaggagatgttactggccaaggaggatatgtacacacgagatccctgccgtcgacgcgtcaagcttagtggctctggcgatccacagtccaaaacgttaggctggatctcgcgctcctggctttccgggttcgtcatacctggagaggggattagtcatcttctcatggcgacgctccttgagaatgacgcggatgcaatggataaactgggatcaattgccaacctctatggagggttcgtctatgaccaacggagttggtggagcaaagcatgcgttgccggacgtgtcttgtctagttcagcgggagctaagacatgcatggggtggatcagcagcgacattatcccccgcgatgcgattacaggggaaatattccagtgtggatggcttgaagtcccggttgaagaggtcttggagatttcgagcgtacctcgaatcaagcaaggaaccaagcttgcgctggaatcgtcgccgctaggcgcgggagctatctcagcaaaggcctttacacttccaacggataatcctgagccaagtgcaatatccgtcaacatcgaaggcttgaatctgtctgtcaaggattacaggcctgccggcgagtttggaattacatctgccgaggcatccatgtcgttcttaattggaggcgcaggtggcgctggagtttcaactacggtttctttccccctcaagtataatgttcgctttatctccgcccatgagtgctgtccaccgttggggatcgcttctcacaagccatccgaccgcgagaacattgaaacccaacggcctacaaaacccgtgtccaagtactcacgtctaccggggcatcctctgcacagctcttatcggtacaagtacgtttcgttggactctcttccctctgccccgacgccgcaattgacatcgctggtaaccccggaggcaactcataccccggagattattgtcatcgacgcgcggggcaaccgagacagggaaacgttcgctcgggcgtggtgtgcttctgttgggtgtcatgcgatcataagtcggtccggaggaactcgtgtgacaagttgtgtcgcgtgttcgataaggcaagcgagggcgatggatgtaatggttgtggtacgtgtgagcgaatgaggtgaatcgagttggtcgcgcatgttgctacttctggaggcgccattcggggactgtccgtaatagagcccgaaacacaaaaggtcataatcgcgcaaaccgacctgtttccatgattgagtacaatatacgaataataagttcacggacattggcccccttttgggaccggaaaagcctttggtggcttcaacgggtttcctctccggagaagccgtgggggtaaggggaaaagccctcccatcggagaacgccagctagagaacggtaaataccaccttccttttctcctccagctgaaaacaaataaaattttaaaataaaaataaaaacgccgcaaatcgtgataggggggaaacggagagaggaatgggctttttcttgggaggacgcgtaaggcaggttgcaggttaaaaagggtgaccctcccccttgagggccgatggccgaatggagtcaagggccccgaagatggtgaaacagtcggtctaaagctgggaggccagtgagatctctgtattatgggtccacagggatagatatctccgatctcacacaatttatggcatgtactctgtagttggacgatgtacggagttctgttactatatatatatatatatattgtatatgaagcatcttgtaggtagaggaaactgtatctcatctgcagagtcctttctcccatacatattagatcatatcgtcttctcatctgcatactcatgcattcttatgcaatgcagtctcttgagcaaattaagcctctaccgagacttcatggttcagggatgtagagcctacggggtagacactccaaaatggcactaaccccgaaagtatcctggtagaattaaaccatcggctattccgtttcctaaagaacgatcatggcagcacgcctagtacagtcaagcccgttacaatcgaaggatcgtcagagcaaatatatttcgaaaccgaaggtatttacgcccggcagaattccaactaaaaaaggcgggacatagcactaagccaatagaatcaacccaatctacccatcacgtgggcgttaagcctaaaaaaacacattgaaaagaaagtttgggcggactaggcctaattgggaagcctcggcgcatcaacgatggtattatctaagcgaatcaattcagggctggcgcgcaacttctttggatattgtcgaggtttacaaaaaagtgggtcgatttcaacggggttttggctgtagctcatagggtaggaatacatacctgcacgccactgcggagcccggcagttgggggttggggctttgactgctaatcccagaaaggaatagttatgggtatttctcgaattgtacaagactacaatattaatatgtacctaagtaggctagttggctagtagacgtgattaagcgacatctgagactgtaagagtcttctacatctatccacccacatgagtgtaactattcttggctaagattagcaagatctggctcagccctggactggacccttgtttcagtttcaaacactttggccgatcgacgacgacgcgacgccccgttgggctttacctaattattcaagcgaaccgagtacgaacattcctgctacaatatgtacggaatatattgtaccaatatattctcgtatgtgtcctatttctgtatggctggtgctgcaatatatgattggagtcgcttgcctcacactaccccgtactgcaagatctatcgcatttacattcgccgcgtcacgatacatgtactgattgttcagctgcagacaaatcccagctgcaaagagtctctgttgtaagacccaatagtatcggctcttgaccatttctcaagaccccgtgctcgtcgatcttcgaccagtgtgtgttaaattgcggggccagagcgtgggaagtccagtgttggatgtagtttatcttcgcaaaatggcggtggaagcatcccattaggcaaaagcttgaaggcacagcatgtattggatagtatgtatacatgagactctgctggtgaattatacgttgtcaagtggcttggagagcacgagagtacggtgatcggtggcgtttattggccttgaggggttttgttgacgtgatacgccatacaacagtatgaagatcatcgtccactccagtccacttgccagaacgatattcctcaagccacgccggacttgacacgttttcctcttcattttaaccagtattcgttgataatagccaccccctttttttttcttctgtcatctgttcgaacaggcacattatcagacggagtataataagcactgatcttttccattcaatcagaaccttcccttctattgtatgatttagccttaatggaagctgagacagaaggaaaaagccccgagatgagccccatacgaataccaagacccaacctgtaacacgctaccacatccagacgatccttaatcaaaccttgacctgccccacacagagtttgtgagatcgcttgcaattcgcattttgttacctatgctgtactatattatattatattattatttgtagtactccgtagtctgctagggctttcggacggttatcctacttgggtgtagttcagggctgtgtagatgcagatttatgtctaccgattggtttgcaaaatatatgatttattgtagtagaatcaaatcttaaagggccacgtacgtgtttctagaaaatgtcgctcactacgccatcatgaacgttgaaacagtgagattgtcctatgagcattggatgcacggggtacaattaggtagagactgctcatccgaacattgtggttggatccatgaagaaaggtccgtggtcactgattggtccactatttccatggatcttttgacaggtttcctctttttttggcctgataaatgcaaccaaatcggattaaagctactggaaaaggggcaaaaccaaaaccacagaagataatttattattcttttttagataattcaacgttatattaaacaaaccacaagaaaaaaacaaaagaaaaaggatccaaaacacgaaccaataacctgatacacatcaaccgtggaccctgaatctgtttttagcacaaaaataaccgatggttcgtttcagttcatatcatgttacggagtaaaatatgggatagcgtgatttccagtcttctagaaggccatgtgggcaacacaacttatgctttagatcgaaccgcacagctccccttcgagaagccccctgggtttctaaggatcagcctgtgaaatgaccggagacagaaggttcttcttgatggaccctcaaatcaacgagcctattggttctgagtgccgacctaagctcgcgtcactcactaatcacctagtcgggacttgaaggaagcattccccagttcatcaatgattgacaggcatccttgttggccctaagcctaactggtatcgtacactttgagcggccactccaacatccacacatccccactgttgtcagggctcccagaccatggttccttgtctctgcttcatttcaagaaccgggtctacaatacgcaatcaggggcattggaaagttacctaatcaaggacggatctaacggtgacaggagtctagaaaaaaaaaggagctacgtaggtgaaaaagagattacgaaaaaaggatcgaaaaggaaaaccttgcagaaaacaagaaataccattcaaacgccagtaaatctagagcattaagggaagttatccgcggacccctgaactgatcatccattgacaatgacctgcagttgatttgggctaactcgatacatccgtgttagtcttagttatgagagccaccttgttccacgtacggcgtgatatacatgcttgaaaattaaatttaatcaaaaatctcagggaaaaaaaaaaacctcccaaaaaaaacccaaaaggcctttgggcgtttcaccccgcgattagcttctacctattggactatacctaccatcttcgatctgctcttcttctcttcacaccgttcgcttcatattcgctccttttgaataccctaattttgttttctttttttgttttctctctactaatctctttttggttatcgtttgactcgtccccctagtgtggtttcttcctcgatctcaaactgggccacaataaacttctaggccctaaccccgtccaaatccccttccacgaacactttactataattatcattgattaattcgcaattgctggacttgggaagtttggaactcccagcctggaatcaatctatcctcgaccattctactgcaacatcacctctatacttggagacacacgggccctgacatacgcccgacatcctcgctctgaaacgcgcgcaatatcatacttgatccagtgtggcgtatgtggatcagaacttgagaattgaagcagcgtcatcctctggaggcactcatcggtcatactctctgtgcagtatttgtatggccttgcgcggactcttgtcgcatacacctttgatcacatctcgaggtactctcggccggctgcttcgcaaatcacacctttcgcttcgctgtggcttttgatgcaccctcgaccgatacagcgacagaaccgtgctcgttggagctatgccagtagctgtcgaccagatgacatcgacagcaaactcacaaagcaccatggacgcaaatgataagaagcgcaataagttgggatatcatcgaacctctgtcgcatgtggtcagtaatatatcccacgcacccatcgcctgtttgcttgtcgcctttctctcctcgttttcgaagtgcgaaactgtgtcgatcaggaggaaataaacaagccatcgtttcgggaacggggtattcacatgtgaccatgttacttatacctttacagtgcactgtcgacgacgaaagatccgatgtcttgtagcgccagatgatacggaaggacgatgtgaaaactgcattcgcttgcgaaaggactgtcagttttttccagtggaccagcaaccaccgattgaaaagaaatcacgaccaagctcgagattggagacaccctcaaccgagcgctcaaacaccacaccaattgcttcctctccgactaatttgatgcccgaccccgccgagactttctacccataccagcctatgccgatgaacgcctcgtctgtgcaggacatgtcaacgtacaacgtcggaatggttcaagccaatatgagtctaacaccaggtaggtttatgtcgtctagacttctctgcactgcaatccaggttcattcgttgactgactgatctgaactagatcgacctatgggaccaggagactttgctggccatcaaccaatggacacgggggtctcgtgggacgaatttacgactatagcggacccgcaactgttgaatacgatggcagccggaaaaggtcatatgatgaatatgtcacccaacttatggaatcccgggaccatacactcaggcctcccacccgcttccccgatatctgcagcatcttcaatgggaggccaagcacagcctatgagccagacggcatacgctatgcagccagatggaacagtttggcaggtcccgccgccaccaccacgaaccatgagctatcctggacaggaaatgggatcatcataccctgatcagtttcacccacaactgcccccggagctcaaacggagaatgaccacacccgcacaatctctgtctgccacgagtgccatgggcccacacggctcgccaggcacacctgagatgcatacaccaggatcggtttcatacccaccaggaatgagctacccgcaatggcaggatatgagtgccatgtctggaatgagcgtggtgccatatcctatgtactctggcgacacagttccacaacacgcatacccgcctaatcctgctcctatgggacaccccggaggcccgtcaaagccatgaatattttcattcctttcttcgacatattatacctcctctcccacgcctaacttttttttcgcatttattcgagtccaagttccctcacgttgcacatcacattcctagacagcctgtttcatttctaataccccgcgggacgtacacatactttttacccccaattggcatttcatctattttcacctcatcctcatataccgtggcgggtctgctttgcagctggtcattagcgggcgcaagggttttcgggtggcatttttactatgatttcttgtctcttccttttctatcatggcttcatcccaccttttcattttctatccatttcctcgggctctttctacccggtctgtttttgcgtgcttttctctatctcatctggtggtattttacccttggttgtatgcggtatgtttgtttctggccggtggttgtctggattggagtgtgatttcacctcatatgttggagcttttctttgggccatcgatatagacttccttttctcttcgtttcctttggacaatttatgtgtaatcttctcaatacatgatacccttctgatctctgtcgcttctgtgtcatcaggaagatgcaactcctgcttgcgggaaagatgtcgaccagctcaacaaccaatagaattaacggttggagggttgatacaatcttattttctctggttctttgataaggcacaggctggaaatgcataattcttgtgtacgtatttcacaataactgccctgcatatctatactttatcgtaagactcggccttttctccagagttcttgtctatcctcaatgtactaagagcctacctgtactatgagcttcttgtttcttgcttacagaagtgtgcatgtatggtgcacccttgctatcaaaggttcattgtaggtcacacaatcgttgtacggagtactccgtacgaagaatctcgcttgggtcgattatttgtggcaaagctaagacaaaaatgagagtagtgatgcataatacttcgcgtacaaagttaacacgtcatgacttctgacttctttctcgaagttccattggcccgggatccttcaatccgcacacaaaagtcaagtcgggttattagctcgcgagagaagccaatcaaatactcgacactcgtcaatagtattgcgtctgggagggacagtttatatccctgagcacacgaatatgccagggccatccgagtccgtgataacaaatcctgacacagatagataggcagatagataataagcagatagaaaactgggagaagttctgataacaaatagccagcattgatttgtacgtcaatgacctcgcgaatgcgacttgataggacacttgcaggaagatagaataaagaagagattggcaagataaaccagagcattcggattgtcatgtttgaattttcccttgcgtgatctgctaatagcgtcgcgtcagtgttgatatgccagattgcaccaataatcccatatctgcgcgagatgtaaccgggaacctaagattgaagatcggtcacatcagagatatacatacatagtcattatctcacagacaagagttgacgtaggagataagggtcgattgtccatttacagcatagcaaattaacgccctagatccgcattggaggatcccccggagatcgatatgaagtaagactctggggttgaaatctggagatagcagagtcacagcatggcggtgtacaacataggtgatagatccaatgataacgcatcattgtgtcaggaaggggccttatctccctctgcacgttcgaattttctttggagatacctaggattctccctgttggttgcgatatcagtgagcgcatttttggcccccttaggtagcgtcacgtcttatcgagacgggcttggtagataaccacacggcatggcgtcaatgttcttgggttgttgagtacaacgtatatatagtgcattgtccctcggggtttccttttgacttcggcttcacttcggtgccaactcggccaactcggccaaattcaaccaaattcaaccaactcggtcacctcggtcaactcggtcggtcaactcgactatgtcaactcggtcaaatgactatgtcaaaccatcccatgtccgttcactcaaaaaggaacccatgtttagtctccttgtgtctccacgcttttggcctctaggtaaacgcttctatatggaatcagtcaaatgcctcaaccttcctaaagattttctcgcgtaaccgcaagaaccgcacagaaaaaaaaaaaaaacaccgatgtgggagaagaccgccaaagtacagagtcagattggcgtcgcgggctgagtgtgcaggacgccacggcccacctccccagtgcctcgagggcaataattgcccaatgctttcccccgcgacatacatctccgggttggtccgggtgcctgagacatgactgtgctttcccccactcacatccccgatccaaaatggatttgacaatatgattagaaacatgtatgacctgaaggtcaggtactttatgctaacaagaagagataaggtccaaagttccaccgatctgcattccctcaaagatgaccatggttaattacattctaattacattcctatcagaaccttcttatctcggattccccgacttgaggtggatcgtggggccaaaaaaaaaagagtaggactccacggcatattggagctgattactctgaaggtgccattggatgggaaaacatcgtcttgtttaggcctcgcgtgcctccgtatcccgatccgggttcccgtctccacatgatttgagtcgaccaggctcccggggacgtttgatatcaaattgacacggaattctgagatcgactcttgaacccacgaggatggccggagttgtaccataaacccgacttgttagtgccgcggcggtggcaaactcatggaaagagagggaagaaaagcagggatattaaccggtacggaggtccgcctcaagatcccccgtgaaggcgggaaacagaaacgaagaacgttgatttgcgaagttgtcggttgccttcttggtactccgtactttacctcggatgggggcgaacgtcggggaaattccgtgacaggccgtcctgtatatcttctccgtacacgggtggtaccgttctcgggtaatatagggatatctttctgagcctctcggtgagtctcgacatccgtaggtgggattgattgcttctatattctatttgatatggcctattatggattatgtgcgagatatgacaaaatcagttggaagctgtgaaaagcagtccgaattcgcttcttattaccaagagaaaaacgaacaagacttgtagaacgtgccttatcttttgagggcccatccgttactccgtttactattccgccccgctgcgctaagagcatggactataaacctcgatattaaaacatctgatcgtgcttttgttcctgcggtttcttcatgggtggcccgagagctacttcgtttgtctccaaactgtcctgtagtctacaatatcccgtagaacaagagacggagagatcgagagcgcatgcgtttgttcgctttcatcccacgagacctctttgactggaccgggtggtgtactccaccattaacgaacagtacccacttatcctgcatctggactcactccggggccgctaaggaacatgatgttttgggagtgccatatttctcctcaagcttgtccgattccaactagccataggaattgatagtacctgcgtttggaccggtcccgactcacaggagcgggcaaggtacattagtttcaattttagtacggagcttgcgaccactcgggccgatgattattcaagatgccggtcacatctatagttaaacttggtcaacaatacggagtacccatgtcagaaggtatgccgagtatgcagagaaagaaacgatgcccttctagatcccgaagtactccatatctccatacttgattgggggaaaggtctcaatcggtcttgtacgtcgcagtatatgcaggcggaaaaaagaaagaaaaaaaagtaatcggctttgaagaagacgggagtggcacatccaaatcatggcaatcgagcgaagcgccgtaaatcgggcatttccccgtgacaacagtaatactggtatgtcaaattacatatagattacatagattacaagttacttcttgttcagcgtcactctaggccctcttttgacatcatattcttcttcttttcctcttttcttgactttatttctgttcagttttatttcaatatcttcaatcctgaagtacgtctgattctaactcatacctggttattgtcgttgcgtggtcggcagtaaaaccaactgccctccgtttccccatcttcccacacgtttcccttctctcctccctctccatctttcatctttcacctctctccattctccgtcttcccttcggtcattcttgggaggattttctcttcccatcaaaagatagatcttctcggggcatgagcgtctggagggtctagccccccctccacgactcattaggaaaatcccaagtggcgttgaggctgggtggtggtttccagatccatcgtgcgttcctctcatcccagtcgtcagtttaattacctattatcatatattattatcataagatccgtcccgtgctaataggcattttacgttgacagaccctggtcgttggctgaatcctgccaatcgtctctcgcttggctgcattcgatcatcaacttccggcaagggtctcgtttacggcgggtacggaggaatttcaatccaacccactttttttttgccgttcatcccctccccccgcggtcgcctctatttgaataacctctttcctctcattgaaaccctacccatcggagattatggacgggatacatcacggagggcacgggagagcccggccttcccaccctatggccttccccgacttcgacgcggattcccatatgatgtccgacgacttctctttcgatactcccttcagtccctccggttcctccaatgccaatgataccgtcctcggcaactccatctttccggaatggacgaacggtgcgtcgcgtggcgacagccctgacgagatgcaaaggaaagatccgctgggcgctcagatctggaaactctacaccaggacaaagtctcagttgcccaaccaagagcgcatggagaatctgacatggcgaatgatggccatgaatcttaagcggaaggaacgggaacagcaggctcggtaagaaacactcttatgaatgctaaagcacatggctgatttactgatgtccgaatagtgcctcggaaactttaagcccgacaccgagcggcatcgcgcagatgcgcttgtccgaccaaccatcgcccgctggtggcgatctagcacacgataccacttcggatccaatgaatctagatgacttcatcgttccctttgattctcccgccgaacattcctcgcatcctattgatcgacacttcacagcaacacccactggatcaattcctattaaatcgcgcaaggaccatgcgatgatggattcgtcgaccgctgcctcattccctcatccaccccaggatcagcgaacaaattccgagtttggatacgtcgcccgtcgggtccgcaaaacgagcgtcgacgaccggcagttctttgccggtttgtctgttccgacgcgcaagcgccctgccgaggcctcgcctcaggttcccccggtatcaaacgccatgatggcacagcactcggaactgtcttctgcactgccagactactcgctcgatcatccaccttctgcctatgctctttccggcaatggcacggtgggtccgcgcagacctcaacaccatcacacgcactctaacattccctacgggttggatacgtatggcattagcgaagatcacgggctcaattcggccggctcataccagcaaaatttccatttttcgccgtcagattctccaatgactgcaggaaatcctttctcgagtctatatgcccagacgccgctcgcctcgtcgcttaactcaaccgagttcttctcgcccccgccttctggctatcagtctactgtgtcaaccccgcaaccgatttatgaaggggagcaatcgatattcttttctgatgcgccctccgctgaatcacacacccagcgccgcattcctaattatatccagcagcgccagtcgaacctgtctgcatcgctgcagccacgttatatgtacaacatgtccaacggcgaatctcactcagggagtgcagttacagggccaccaaccacccacgtgtctggattttcggtgccaccaccgcagcatatcaacccatcacaggtgcttggccatggcgaattctctacaacagcgccttccagtagcatgtttactttcggtggagactcagacaacgaagatgacgatggcaactttggtgaaggtggaggcatgactatgccaaatgactttgcctctctggatgagtctggtgatatgagcgccggtcttcattgggacgggggtttccccggatcaatacactcgctaccaggcttcaatgctcagcaccgtaagcacgttacaataggatccacggacatgatagatggcccacctgaatggaaccagggaggcactcttggtcgtgcgcacggatccgctgcttcggtcagcgaagtccgtaaccaaaaccaggatcctcgtcgctacggaaaggttccccgcacagcatcgacgcccaatgctgctgcactactccgtcagagcttgaatggttcagccagtgggcctccaacaaaccatccttcgccaagcacccctccagagtctggtcttagcagtgcggtgccgtcccggccaggtagccctggtgggtcgaaaaacggtgacccgaacgcgggaccgaccacctgcaccaactgtttcacccagaccacccctctatggagacgtaatccagagggccaacctctgtgcaatgcatgtggcctgttcctgaaactccatggcgttgtccgaccactttcgctcaagactgatgttatcaagaagcggaaccgtagcagcgctagcacacttgctgtcggcacttctcggtcatctaagaagtcttcccgcaaaaactccatccagcatgccccatccacatcgatttcatcccgcatgaacacttctgagtcgccaccctcgatgaatggatctagctcgttgggtaaaaccggtgttgtcccaattgccgctgctccacccaagtccggtcccccggctggcgttgctcaagctcgtgctggtgtgcaagtggcacccaggcggcagcgcagactcgaaaaagcaccaactggatccgatccagatctagaggacagccctaagtcggccgctcctccgagccgatccaaagtcgtaccattagctccggcgatggcaccacccgctgccgcaaacccagcgaatcacagtatcgcgggtgggcagggtgcgagtcaggaatgggagtggttgacaatgagtctatagttggcttctaccacatggtccttttcttttgctgagttttgccgaggtgtgaccggttaatcacctctataatttcacgtattacacgacttatgtccccggcggtcgtggctcctttattactcccatgttttcccagattattacatgtcacgtgtccctttttttttgactttttgactttttgttgatttgattgatacaaccgcgtctgtccgggacccgagctgcttattatgtcctcattcttatttttgttttcttgtttcctttgttgtctcgcagctcggaaccgggcagaagtgcgcatctctctctgcgtttgttttttttttttttttttctttttttctgttattattctactcatctattcttggatttcttgcgctgctgagcaggctttgattaatggattctgttatccttgcgtgattacttctagacctggacttcaatatgaccatgattttctccaattcgcccgctctccacgttgattgagcttaccacctctagatgtaattgagccctaaactattttctttccatcactaactgcaggctgagcgaagaatgacatgacagctaacttcagcccggacattaatccggggaaacaatttacgtcatctcgacgaatagttgggctgtactacttcttcgagcttcctcaagataagttacttttataccatacaaggccgcagtgtattttatccagcaatcaaactaacaccaagatagctggaaaggtaggatggaacttcttttaattaacatccaacacattgacatggtgaagctgattctttccaacagggcaacatgtctaacacggacggtgagtggctgtctcgtggatttccttagatatgcagaaccctattcacacataatagaagcctcggaaccattcacaaccaagaccaataccacagatagggtcaccggccgcgtccatgagtctgccagtcatgcacgcgagaagatagctgaacagctccaacccggtgcgtatttcgagcggcgatagcgcgctggctttgttgttttacgggtacggcgaatgacgtcggatctggagtcgctctacgtgttctttcttgatgccggctagattactgattgagttctgcaggagatacgaaggcgacgtctcgtcgctcttcagatacacccgataatatctggcaatttggacagggtggtccgagagaagagcgagattatgggctagagaggaacaagtctatactgcagtccgcgcaggagacggtggccaaggcccttggaggagggtctcgtggttagttgctggtgatggcatttgatattttggtcttgctgatgaaattcccaaggtgcaagctaaatgcctctagcaattccttcattccttctcctatcctttgatttcaagaaattattcatcaagcttaggtgattgcccgctattcatcatactaagagtaaactgctttcagccgtgccaactttcctggcaaatatgcgtattgacttttatggcgggtttggattagtagttagatatacttggaaatttcaatatcctctctctttaattggctcccagcctttgtcctctctatccagttttcaacaccagtaacagcaccaaaaagtgagttcttctgctccaataagaacgacaaaacttcagctagactgaaaaattggtctggcaccatggaagcaaagttgtcggcaagctgggaatgcactctcttgtctgcgcggccaggccgaatgagtgcttcatccagatgctcgatatgattggtcgtcataacgagcacctgaccttcttgagacgacacaccgtcaagaacattctagcacaagtcaacagagccgataaatatggaagttatccagaagaatgaagcattcagaaggattgatggcaaaatgaaatttctaatgtccaagtttttgttcggcaagatggcatattatattccggaaaatggacgaatcgattaaattcgccaaagacgttagacgatctctaggaaatcaagcaactgcaagttagtacccgaattcgtccacgggctatgggtagaaagcccgattatatatcgagttgagagctagatgcccgatttcccggaacattgcccaggtgtacggcaggttttcccgttcgggaaaattcatgcctcaggcaataactgatatgataagtcacgtgtgataatcagagcaaaaaaagatcacctacagccatccatcttcaatcaattgacattgcgcagccatgggtgccagctctaaaagaaagaaggataagcaaaaggactttcaggttaggattgtgaatctccgtttctcttgttcaacctactaacttctgcagaaacctaaactgaaggttggaaaaactaaagcgaagcccgacaactacactgataccagtttcaaatcgaagggtatgtgtatctttttggctgcttagtatgtggttatgctcacgattactagctattgtcctcacgcaacaatctctccaccttgctgccccaactgcaaatgccgtattcacgcataacttatctctcctcaacgccaagtccgacagccaacgacgggagtcgctcgcttatctgactacgacgatatcatctcggccagtaaactcgcctctcccacaaccagtcagcgttattctaccatctctgctgccgctcatcctcgatggaagcaccagtgtacggactcagctcctcaagctcttgcggactctcccgccgggcgatgtcgaagaccatgtggcgcaactccttccctacgttcgtgcaggaatgacccatcttgcagcggacatccgtagttctgctgtggagatactatcatggatggtcgaggcagcgggagaatcaacagtttcctgcgcgggaggatggatcaaaacactcaactgcttcttgtctgtgttgggctggcacaccgaagagtcatcgcagtggtcttcaagccgggcttcatttgggaagtctggcagccagggcaagcccatggtcaaaacgcttgggactctggcaaagttcttagatgcggggatcggaaacccttctatcagcggtgtcgatagtgagatgtcgggtgatgatgagagtcccgactggccgtttccactttgtcagaccgcccaacacatgatctcagactcatctaccccattcgcttatctgaatctgtttgggaagccgcgtgatgaggaaggagaaatgtacgaaacccgtgaggataggtatcgcgttttctcgactcgtttccagtcagcaatcgagcgtggaatcaagagcgccagagaggaaggcggcgaattgggccgtgcatcatccggtgtgactaaggtgttaaaagaagcgattgcgtacggacccggcccatgaatttttcagccaaggtttacgagcaaaaccaaatccatccgatataatggtaccgtgacctaggctgggcctagagctttttgcgggctttacctataagccaccagtggaacacgcatccagttcaagatttctcggatatcatactatggtgtctgttttaggcagatggcctcgccctgcgaaaaccgagaccggcgctgaatagacccatcggtaagcccttcggccaggggcccttgcagcaggtaaaagcaagatatatacaataccaaggctccaagccaaagccttaactggaacctcatatatcttctcacggaacattgactttagtcattcatccccatagccttggagagcgagaaaatcacaagcaaaataatctaatatcatctatagaaaattcgattgttagaaagagaaaaccgtatttttatttcttcgtaaacgatcagaaggcaaacgacaaaagtgcggagtcctattattagataggctctgaaatgctgtatattgtacatgtacatgtactccgcacggagtatagaatatgtataccatttccaagtcaattcccgatcgatgcccaaggactaaaactatcctgtttgctgtgatgtgtgtgttagactctgtctcttattcgcttatactggtttctttacggtcttggaagtggatatcctttaacatattattggagacaaagaggggaagacttgacatgtcttgtagcgtgggtctggcacttctgcatttttatttttatttttttgtttttgtttttgtttttgttttgggaattcaggaccacgaaattgagtactacagatgtgaagaagagcgttttttcggagattaagtgcaggaaatggttatggtgtacaaagtactccgtactatctacaatatgtaggtaatgtgtgagacgtcaaggcaaggggttcacttcatgattcattcttccagaatcttatttcttttcgttgaatgggtctcacatccaagtttctcattctcacttataatgccggtatagattaatagttatgtagtacggagtagtgttcccacattgctacatattattgacatatcgacatattgtatattgtatattattattcaatctttgaagtcattcgcattgatcaatatgttatgttattgaccccctatgtattttcaatagtctaagaattgagtgtgagctatctcaccctctctcatttccccgatttacatgtacttccccccccccaaaagatcggccatgatcgactgtctataccctcggatctgcacaggtccgatctaaattcttgctttactcgggaagatcatgctaagtgcttggcttgaaaggtttgttctgttggatctgatacctcacatccggcggggagcccgggttacggagtacaggccggcctgacgttttcttttctcaccccccttgcattctctaaggggggcaggaaggagaaaagccaattagtgaagagccgttcgattgacgattggtctatggttggccagcattgtccttgccacaataaacacaatgaggaaaagggaccgaatccccgacggcaacatgcagctgcattggcacgcccgagtctgccatacaagcgttgtgtcatattacctgctggatcccaaactatacatcgcgagtgccacagcatgtttgatggctagagttgcctagtctgaaaagttctccacaggaccttgctcggacgaatccctttggaaaaactcattttcatcatctcttcggattcgtactaccgttttagcctcaaccaccctgtatatctgcgcctttccaggttccgggaggggcttcctgggactactcctgtgttcgttttagttcaaggatcccctccaagtaaggatgcgacagctcacctgagatcctattaaactctctccatttccgcctcgcagtcccaagttttgttcgctcgttctgattctcccatacagaacgccacgctcgccaactcttgtcgactttgtacatatcgacaccccctgtatatagtggtgtcaacttgtgtcgacgtatcatattcatattcctcgcgcgtctatatagcccctggcccctattgtgttggccctcttgagcaggtgagaatgcctcgctcccgagccagtgcctcggtttatccttctaacttagaagtatagcactgtctattgctttaaccggtaagccctgggttttcatgtcgacacccgggaactgccggattgcaaagcaagccagtaattgatgcttcgtctccctatgcatcagtttgattcaccgcatgactgtgccgttgcaccaagcccaatcgttcggacttatcgacctgatcccccctcgaaacgcaggatccccaacatgacgtccacaaagactgggccagcacctaagcctctagtcattcctaggcctcaaggtggtagtgctccacgacctgaagcccgatcagcaggcacggctgaaagagccggtagaaatgaaagcctagtggacatggttcgattcttccaggctcaaaatataccctcccagcccccggctccatcccaacctcaaccccgctctcgcgctccttctgaacctcaaccctccagtccttccgatacaaccactgcactcccggttcctgtttcgcctaaagaatcaaagccagagtcaaagctagatccaaagcaggacctgaaaccatttcatcgtcgccttttgcagtttgcccagcgccaaaagaaggaatcatcacccaggtcaaagcaagaagaacaagagcgtcaaatcgaagcactgagaagggaaggatatcttatgccagcggctttaccaaaggagtcaaagggacaaaaggaagcaaagcgatcaaaagaaagcctgtcgctatctatctctcgatctctttccaaatcaaagaaggacgtggagaacattggacagccatggctgcaagccaaagtcgatggcaacaggcgccctactgaaaccagacgtagcttgggctctctggatcttgatgatttcggctcaatggtcgatgtcgcagtctcactcgcttccgatttcgacgattccatgccgccgccatatcagcccaccgatcacccttcctcccaatcctcatcggctactccaatgtcaagttctacagcagaccctggtcctcacaatatcatccggccagcttcttcgttagcctctaccagtcattccaataggaacgcgtcaattgatgagcaaatccaacggtcatctagctctgcagagttgagtatccgtgccgaccctgtctcacgaggcacgatcaatacatccgtgggtgtgaatgtgaccgagccacagcctaaaccgtccattgatagccaaaagcgaactcaatcagaacaatcttctgttcgaaatgtaacacccctgtcgcctaccctgaagctttttcccgatattgcacctcgcaagtctagcaggggcgcatggagaaattcatcaattcctcggtaccaaacgatcgaaaataccacagcatccagctcacgaactccatcttctgacagcgcccccgatgttccagacgagcgaaaaaagtcttcagatggttttatagatgctccagtcagcgaggcagaactaaagtgctctggtgcccttgtaccttatgcgacctcttctgcagcggcactatctatagaaaaagccccaaaggattctgcctcccaagatgagactaaaactcggccactctcgttgtctctgggcacactgaaggcatttcctctcccggcacctacaaagcccctgccattactgcccaaaaccaaatgctctccaagcactccggactccaacactcgctcgaaagcttcaaatattcgagcgattgagtcgcagccactgtctaccaatttgtattctccttcggcaacactaatcgaagaccaggagctcaaatccgctattgatagtccatgtgcccttgactcggaccctacaaactctcttggcagcgtcgatgccggggagtcaatggccgatgatgaggacagcttgtttaccacttcgctttcggaacactaccagccaaccccggaacattgcattccgagaggacgtgtttcaagtgtgcgcatccctaggatgcaagaacttcccgaaagtccctcgagtgaatgtggtgcaaaggtctcagaaggacagcctctggccgactctcctgtcctaggacacccaacccctacaaaatctaatggcaaacgtgctgttttgaaggggcttcatgtcaattcccaagccagtcgaaaaaatcttccattcggtctaccatcaccgccacccacttcatcactcccatcagctccacctactcagcacccacctcctccgccttctgagcaaaaggttgaccaacgcaactacactgcgcctaatgtggctgttctgccgtcaatgaggaagatggaggtgcatccttcatcggggccctaccgaggctcgaccttatcccggagcgacagctcagggagtagccttcgacatgagaggttccccgaaacatatcaacaaagtcgccccgaatctcgcaccgaatccccgcttccatcatcagacgatgaggtttttggtccagggatagacggcaaatgctcgcgccggaaagccgacaaataccaacgcatccaaccaacacgccgaggatatgagacaatggatccacgacagatgtcctcacgcagtcgccttcgtgactccaatcctgcgcgccctatgacaccccaaagccgcagcacccatggtcttgggaagacttcgtctcctcagtcacaatattcgcaatcaacccacagatcgagggagtctcaaagcagtcaccacacccgcgctgctcctcaagtggatcactacctcgaggaccgggttgcgaatctggaacgccagaaccatattttacaggccgctcttatggcggcgctcaacgctggagtcaagaaccctctcgagggtctcaatctagacgcgcacatgtcatcaggctccgcacacgcacaccaatatcccggccgccatacatcacggcctgacagctgggtcagttcttcccgcagcagtgagtacagcgggtttgagacttctagctcctaccgagatggccggccaaacgtcaaacagctggacaacatgatcgaagacatcgagtctggctggctgtcggacaagtctagtctcagtggagctcgaattgcccgcaaacgatagataatgatctctttttttgctttccttatatttcttttttacatctttactgcttctgacaccacggtgtcgctcatttattggcttgtgatgatctttttggcttccacttctatatatccaggccctctctatctttgcctatatttttcatgataccattttgttttgctattgatctttttgcattcctattattactgaatgacctatatacttaggccgagttgacatagtacaccgtataaaacgcgcacagaattgaaactacctagaaggtcttgaataatagaggagctattaagtcaaatcctgtcgttttatcagtacccaaagagcttagaggtctttaccggaggattcgatctattcattggatgttttgtgcccatcctaatgcttagtcatttgttttggagaccaagtaactaactaactaacttcttgaactccaagtgcttcaatcattctggccgaagaaaagcacgtggcgaaaacagcaattgcaaagatatgaggtgctcagtgctcgtctaactcacccccgaccataaccctcacaccgtataccaacactcttcacattcccccgcggaaccccccaaacatggcgaactcaggacaagtaaatgcaacctctcctccaaatggacccaaatattctaacaagcctccaaagcgcacacagcaggtcccccagcatgtttccgcgctgctctcgcacctcacctcgcgccccggcgtgcaatccaccttgattctctcccgaaaagacggatccatcatccaaagcacaggacagttagcacaaatgaccgaagagaacggaggttctcgaaccgcacacatcccctcagccacaaccgatccgactgccctctccgccgctcaacccacagaaccatcccctacctcacccgccgtgtcacagccctaccaaccctcacaagccgagacactagctgcccacatcttcgcgtttgtctccagtgccgaggcactcggtgtgtcactatcgcggcccactcccactgtgcagcgacccagcgacagccattgggatgataactacgactacgggaacgaggcgggcacagcacgcgaggaagaccgggacggcgatgatctcgatcgggatgaggatggagaagtgaagctgctgagaatgcgcacgaagaaacatgagattgtggtcgtgccggatcggaagtacctgctgtgtgtggtacatgatgcctcccccggcggaggacctggggcatcgggctcgcgctcccggtagtggaagtcttgttctttattgcgaatatggctgctcgagtcttccggtttctctttctcgttgtgtttttatgggtcttgtttggtggctttggatttcatacatatacccgatggagacaaaatcttcgcatttaattcaagttttccataccatggctatgtgtaggactgctatacacgggttgtcaagatggaggtgtctattgataaggaacactttgttctattgcttgatggagggatgatatacggcgggcaatgtgggtagatgtttgagcaacctccgttagctccactgtttacccctcccaagctgacaatgatcaatggacagacatccttcgtatcttgcaattcccacgcctaatagtgcatatatcacctagctataacaatcgagtctgacctctgctctcgatatttcagcagctcgctctggcttccctacactgcaataacaacgctgatgagatggccctccgttcttataaacgagacttttgctgattgttaaacgacaggcggaaatcaggttctcgatactctcgttaatctgatcgacactattgtagattttaatctactaacgtggccatagcatccattcttacctgctaagcacaaatgtctggctcagagtcagctataatgtctcccagacttcgactgatacgtacgaaaatgcatgcaaagtagctgctgagctcactaacgccgcgcctgaggaggtatctgcactataatcaatagcgtttacttcccaagaagtataagaactgcccaacttcgggggtgaatgtatggaatcagatcagcattggtatatcaaccactcagctattgtgcaatctctccacggcgattaaattccaatctggcaatgaactagtcctatacaaacttaacaacaaagccaatacctccccgtgggtccatatagcagagaggttgggcttgaccgtaaagtggtgggcgccgaccaaagaattcaatgtgcgatccagctgagtgagggtccctgctctccgataagaccagactcgcggcatgccttcatgcttccaatatcactggcactatcagtaccatccgaaagatcgcagaggttgctcatgttcatcccgcgtgagtgaccataaaacatattgggttctaagcactgatgtgtgtggatggagtggccctggcgccgcatcgtcgggtcgacgtgaaggcgttgagcgtgggtttctacgtaaattgcaacccaagccttgggtgaccggttcattgctgatcctccccccacaaggcattatcctggtacaaggtgtatggaccacactggcgcaactatatacctcatcacgcgttcacgaccagatctagtcactggggcatttcttcaagcccgcatataccctaggcatgaagctgaatctcatatcggctaattatgagcttacacagagtatcccccaggttgtggagtacttttgactccgaccctagcacgacctgggccccgatggccaagcacgaggagcgcaacagattatactggaattcctagcttctaatagccggattcccgttatcggtgaaccttcagccagcaaggagctccgtatgccggttgttagtttcgttgtgcagggagtggacagtccgcgccccgtggatgaagttgagcgtcgatcggccttttggttccgcaatggtcatatgtacagctacagctacagccaccggctactggccgacgtgtgcagattggacaatgtaaaggacggggtggtgccggtcagcatcctgcactataacaccggtgagtggatatcttgataggatttattcgatattaacgaggatagaggccgaagtatgggggctggtgtgttgcgggaggtgcttgttctatactacttgtagatagcttactccgtacatgcgatgtacatcatacctgagctttccggatacattttacatgctatggagatttttcttcgaatttgcctttttttctcccacatcactacagaccgcatattttgccacttagctgccctgtagtggtgatctctatattgtagatagttaaaccttcgagaaacccacacaccttgaagcctaaccgtgaaatatctgctctttgttttcagcctaagttcccaccgtgaggtcatctgagttccaactcccgaggttccccagctccatctggaaggctgcaggcaaccccaaccaatgccgatcgcagtgtcagccaatcagcatagagataatcgtggaataatgggaattatagtggatcacagcctaacagccgcgcgtggattggcccaagtgcgaagacagcgtggcaagcggcttttatgactcagtggaacttcgacagagccttcagaatggatggattccagctgtggttgagtattatgatgaacatctcatgaaccttccccttgatttgttaatatggggtcttttttttcttaaaataagatccatcacgctatgagtggctacacagacataaggtgccactgtatagtcaaaacattccaggtactctgtcatgtttagaatatcaagattagcatgataatagatatagaacatgagatagaagatattagactatctaatagcatataagaagaaaagtgacagcagcgtgagtcaccgtcgtaccactccagggcttctcctgccctcctatctcggagtctcttcgccgcatccgggttttcccccctctcaccatctctagagaatgttcttcatctcctgattcaagggagaatatcatcaagaagtggaatatttgactatattctatattctgtatacagtcgtggtccctgcgcctcccggcatcttcctaacccgccacccacttcttctcgccacagtgtgactctcttttccccttcctttttgcccccccccgaatctttcttagtcaacttaaaaacagattttgagaagagtcataggtaaggtcgttccatagtgaaatgtcttctcttatttctctgactcctctaacaacatcttgccttccatcagcctcacctcccccgactctcgcctcctcctctgcctagccgcttcaacgactgccttgtacagacaagccaccagcgtggttctgcctgtccacggtccgttgggtgccttgatataaacccttttctatcacacgacttgtttcaaaatgtaccttattgattcatccgttccgatcgcctgtgttgctgttaccgacctccgcatcgtcaccgtctccggctccatctaatacactcggacaaaagagtcatactgccacgtgcccctgctttggttcttatatcagaagcacttggttgatcggatcgtgaatacgttttccttttcttgtcttcatagttgattgtttcctctttggcctctttttaaccgctacacccggcggttccgcttatttttctacgtctggttatcagcctggctctctacttttaaaggtctgccgtcgccttcgtcgcaaagacggcttctgtctcctcggctctcgttcccggtttcctgcttaacggtatcttgacactacggttccaaaaaatcggaccatctcgcttttatccggctgtcttcatttgaacttgtgttcacacaaacgcgctatatgaactccacagtactttcggatatgtcagggatggacgtcttggggttgaacctctcaaacccaagctctcaattgacagcgtctcaccacgctcacccctatgcctcatcgatctcttcctccgcttcctcctcctcctcctctgtattctccctcgattgcgtttcctcgcagagttcgatatcatcgacatctaccaacccggttgacgtgatttgggagaatgagagtaatagccagttggcgggaagaaatccgaacggggcatgcccccgggcttttgccaaggggcctgcttctaaggtggacggtgtagtgccatccgagctgcgaacgcaccctcggcgcactaacagttattcttctagcgctcccagtgcgcgccctccgccatgtctgttacggcagtcggaacggaaggtgaacttcgtcgacaacctcgtcggtaagtcttgaaaaagagaatcctcaagtacgtcctcgtacacccggctaaataatattcccgcttctttaagacaccgcgtcacagatcgttgagaccatctggcccctttctgccgcggcatcccgcagtgacgccgcgaccggatccaaaggggttcttcccctccgcacttttatccaggaaactctccgccgctcgcgtactagctacagtaccttgcaggtggccttgtactatttgatcaaaataaagcctcacgtgcccacgcatgacttcaccaaggagcagcctcgggatcagtcgcctttgcgggcgatgcagtgtggacgacggatgttcctggcagcgctgattctcgcttcgaagtatttgcaggatcgcaactactccgctcgtgcctggagcaagatttctggactcaacactctcgagattaaccagaacgagcttatgttcctcaaggctgtcggatggcgcctacacatcgatgaagcaatgtttcagcgctggactgatttggtcttgaagctgacccctggtgccggtggacccccggttgctaaaggtcagtgctggcagactgtcctacccagactcacacctgaactggactatgtagagtcagagccattgagcccggttgcggcgattagtgggatggatcttggtctgtcggaatactcacctcgcagtctgccaatcaatgaatccgtgcgctctttgtcgcgcgaacaaaccccgacttacgcccggagtcttccgcgaacattggagcccactccgcgcatggattttgccaacttggctttgcctagtattccccggcctatgatgcttcctacgccacagatgaccccgcaatctcaagtgtcctccactcctgctgcgagtgtgggtgcttataatgcctgcccatccatttgtacggctatgtctcaggcgcagaatgcgtgcatggcgcgatcaacactcgatcagcgcccgcccctgtcattctgccctcggactcaatcgtacgatggctatccggctgcggctcgtcggtcgtctttggctcgctcgacatcttcggtctcatcacctgactcgatggtttcggacgtctctaccctgtcatcccgctcttcgcggtcgtcatcagtttcgtccaatgcctccggtgcttctggctcggcgccacctcgtctggccgtcaaggccacattgcgctgcactagtaattcccttaaggagtcccgcaagactctggccattgcctctcctattgacgagagttgtttggttggcgtctacagctctcctggatatcccagttccatgggttcttccgtcccagacctgtctactttttccctggattccagcctgagtgaagctgctcagagtctctgcgagctttccggcgccacacccgaacggcgtcagtgccgaaaacgcggacgtactggatccgacgatctcttgcttcagaaccatgtgcgccacctaatcaatctcggtgtatctggagaccactgcgggttgcctgacggacagttcccatgttcgttcatgacacaacatgggtcttccgctgtccccgcgcagataggcccagtctctggaccagcaggcatgaaacgtgcctgctgtggtagcgaagcacgcaagatcgcgttgaacccgagtctccgtgttgcggagtacctgaattgacttgcgatttattagcggatttccttttttttcttatttcctttgtgcgaggcaaaaaaagaaaaagtccgtcgttttgtttttgtttttttccccctacgacgacctgaccccgttgtacatacccctattctcgggtactcggtcgtacgtactgggacttgggcgtttgattcccacgaagtgtaggatgtggtgatgactggcgtgtcttctacttgcatcgtgcatctgctctttcactttttcccctttcttttatctacttttgcggttgcgaacggagtggtcggcatgggacggttatggtctttatttaccctggttactttgggaggaagcgggcgtctgccctggttacacctgtatcaacttatctatctaaggggtggtatatttgccatcccagagggcgagaactcctcggataggatagtcaatccaaatacagctcaacagcgataccggcccctctcgtatcactaagctccctggcaaccttagaactgcccagatgtgcacatgacagtctgactgtgcaacctcggaacggcctcggggaattccatggttttattgtgagtcatcaaggcgtcaatggacctgtgtggggctgtgaaccttgggtgtggctgtggggtattcccggagggggatattagccggtctcgatgttgtacatggaagtatctagtggagctcatgcatgccacatattgttcacagctcggctcttacaaggagttatgtacttttatttcgatcctggggtgcttgagcatatgcagacaaaaatcccatgtctatccgcaactgattataatagggcgggactaacaaggtctcctgagaaacgagtgcaaatgcttagaagtctggtgtgacaatccttggcttctatcgggtggactcgctgtttacgatggcgagaaaagaaacccatctctccgtatgacatacatactacggagtagttgacgctaacagaaaattaaggatatcgatgccagagcctatctagatgtggaaacatgtatactagtagataaactttgtatcctatattatcttaaaccgcttgttattcttcacgagattgggcatcgaaatggatctaacgaggaagatatggagtctgatttcgggaagaggacatgaatcttggccccgaaggcaaagactatgacgaacaatgggggttagataccttcaatttcgtaaagccagagtgacgacctatcaacgcggttaatcaatcctcaccgcactctgaggatggagttaagcagatgaacttgttgaagttggagagcttactagatagttagtacactacctaaatacatgtagttgctgggctctcttgagttgcgactggatgacagaagctttgtacggcaatttcgtaactagttgatattgatagctaatcatccaccgatgtcgtattaggcaaaaatagccagctataccttggcctggagactattgaagagaaaaatccgaggtggcaccactggcggttagagaatgccgtagcaggtgactcgatcagataagattgctatcagctgatgcccccgcacttacccgtttcgttctgctctcttcttccttgcacccttgaatatataagagctcctttgatgccaacttgtctatctcattagccgtcataatggtctctcatttggcctccatcctcactggcgctcttgcgctgcttttacccctcacggctcacggctttgttgtcccacttccagacaatctccaagcctttctcggacgactagatacttcgacacccagcccgaacattaaccatattgaagatgaaagtgccttgaatcgaccgtcatggttcacttcgactttgatggctcgtcggctgcttgcgctgtcaccctctggcgtcatctccaccaacttcccagagtccctcccaccctccgcacatgccccatcagatgttgccggtctgtctatcggactacgcgagtacattgccgattgtgatggatccctgccatcggatttctctcacgatgatcgcggtgatccaacaattcttggccttcgcattggaaccacttttaagaacattgcagcgggatctaatctcagtctccagttagactggtgggatcatctaaatgaggccggtccagtctaccctggtcttcctctaagcccggctgctcttccccgtgtcaccctcttcggttacttggagaaccttccatccccgcttcccgatgacgcagctgcggccctcgagaagtgtttcctcgagcctcatcccgatgcgaaggtctggctacctggtgcttcttattcgccacatgcgagtttctgggcccggttggtggtcacccatgcttactggattggtggatttggcgatgtacagcagattgggtggatcaacctcacggagtggcaaggggtccgaccacacggcagtgtagagggcgttggtgatggaagagggtggcaggatgtccggttgccgggtgagaaacagtaaatggagtacctaggtacttgcatgaagattgacgaatgactggggcgcgcagtgacgatcgcattagttctttcgcattagacctgcgcatgcatcatggatcgcaattaagcgtatctctatatctctccacgctaaccagttttacgaggtacttttgagttctctcttctcattcgtcccctagtcttatctacataccgtaggcttatcattcttatcttcatccctgttgtgcacggggcaagtcgggggcaaatctggggaataagaagacgttgagacctgcatcatttttggtctcattgtattacttctatatcattgagctgtttgtcgccttgtgttgtggtgttaggttaattaatatacggatcggggcccgaaccctccttatcttgagaacaaccatctcgccaattgcatcttcgaacatgaaactacgcatctccaggccccatttacgggtctcgcagggtgaatctgcatttgcagcgggaaatgcacggtggacaaaccgtgatctcgacccgattaccagaattggacgcaaatggggtatcctcagtataataggtacggtactcgtgcttatcttttacaaccatcaggctggggctaatagaatatgatatcagcatattgggtctccgatgccttgcatgcagcaacctggcagttcgccagcggtatgattgccgtcggcctcacctaccgtgaagctctgggcatcgtcgccctgtccttcttcatcatgtcgttggtcatcgcagcgaacggtactgtgggcgctatataccatgtcccattccctgtgattgctcgtgctagttggggcttttggggctcatatatcgccattatttcacgagtcatccttgctctcttctggtttgctatccaaaatgtcaacggcggaaatgccgtcagtgtcatgattggagcaatttggccaagcttcttgaatcttccaaatgatattcccgagtcacaaggaatcacgaccggcggtatggtcgggtttgtgatcttctggttgatccagattcccttcctctgcatgcatccaaacaagctgcgctggttatttacaatcaaatctattctggttcccatcgcctggattgctatcttgatatgggcgtttgtcaccgtaaaaggtggtggtgccgtatttgaaaagcaggctccaaccgtctccggctccaagtatagctggctgttcttggccaatatgacctcagtcttgggaaactacgcaacactctccgttaacatggtatggatgctgtcttactaccaactttcacaaaagctaaccgttcccagtctgacttcacccgctactcccgcgtcagtccccgctggcagctgctctatatccctatgctgcctgttatattcactttcttttcctttattggcatcgcttcttcatccgctggccaagttcactataatctctcgtctatcccatgggatccaacagtcctgatcagctattggcccaatcgcgcgtgtcgatttttcggcgcagcgtccttcgcactagcctccctaggagtgaacatctcggccaattctctttcggccgctaacgatttcaccgcactagcaccgcgatatatcaacattcggcgcggtcagcttctttgcgccttgctgtcgtggtgtcttgttccctggaaaattctcgaatcggcaggcaacttccttgattttatgtctgcatatgcgatattccttggtcctattgcttcaatcatgatgtttgactactgggttgtcaaccgccgtcgatatgactgtcttgctctataccaaccccataacccaagatatcgctatgagttctccatcccgggcttctcgggtaagagtatatctggtacaaactggcgtgccgtggtgtcttttattgtgggtgttgcgccatgtcttcccggactgatcaacaccgtgaactctcatattgatgtcggcgtcggtatacatccgttcgagtttgggtggctcttgggctttgttgcgacatctattacctatgtgtctttatcatggctgtttcctgcgcgagagactcagatcgaccgtgctgttttacctgacgagatatacgatagaggcacggtgttcgaaggaatggaagcagatgacccagataggaagtatgtggttcctgatacacaggagaaacacatggatgtggtttaggctgtctggggtttctctgataatcatgtgaattttatattctgtaccaagtggcatgtagatatctttgtgaatataatcaacttcaagaatatgccgaccgcttacctttgtccttaataaagtaggatacttgagcaggataaccattcatttggcccaagatgatataaccactatgttttaatttgatgacactatgcatatgttcccagagtgacagccatttttatagcatcttttcaggttctaaatccggcccttttcccttgctgcaattactaatacagcggcgaatgacacgaacccccattttgcttgacccgatctaggtcgagagggttgcatcgccattttagagattagtccaatacaccatgtcggcctattgaattggggaatggaaaagccaacaagctttccaatccgatggtttccttctcaaatgctataacaccaagatacatgtagagaaatggcattgaaaaaacaccagtccttcggcaatctgtcgtcaattccttggcaatctccagttgaccttccaaggtttattctgccttccggtatcttgtccactctcatgtgatatcacacatcttttaagtggtaatgcccctccagactagcaggtggcagacacgttgctacggtggttcggagcatcttatatcctgtatctagatggaggtaactaggtagatcatatcgtccttgaagataaaggtcataagcggccgataatgtatgccttggaaatattaggatctgaatgtattttcgtagatgccaaagaggtatctacctggccatataccaacgcccccccccccnnnnnnnnnnnnnnnnnnnnnnnnnnnnnnnnnnnnnnnnnnnnnnnnnnnnnnnnnnnnnnnnnnnnnnnnnnnnnnnnnnnnnnnnnnnnnnnnnnnnnnnnnnnnnnnnnnnnnnnnnnnnnnnnnnnnnnnnnnnnnnnnnnnnnnnnnnnnnnnnnnnnnnnnnnnnnnnnnnnnnnnnnnnnnnnnnnnnnnnnnnnnnnnnnnnnnnnnnnnnnnnnnnnnnnnnnnnnnnnnnnnnnnnnnnnnnnnnncccccccccccccccccccggaagcatttgataacatggtgaagtggtgagaaggcccgaatgtgggtaacgttggaaagacgcaggaagatacaaatcaagacgatattcatcattgatattagagtattggttgaactaggtgacaggcatatgacatagcgtcatgcggatgctcacaggtacatcgggattggccttgcggcgcttacttgcgttttggcttgggccggatgaaagggtctgtcgccttctttttgcgcattattggaggtcggggcttgggagcagcttggttgggaacctatattgataagaaatcggtgtcagtaatcaataacaaagtcagacaagaacatgacgcttacatctgctccagatcgcattggtggagcccttgtcgggtcattttcggtcggatacgcctggccatcgcgagaaggcttgatgagaccctaaggagttgtcagcatgtatgaaagctagttgttgaaatagcgagaaaaacttactcctggtgagccattggctagcgggcccttgtaaccattttgagtattggccactaggttgtcgcgagggggaccagaaagacccgggtgaccactgactcttgggacattcgaaccacgggcagccgggccagatagaccgggatgattactacccaatgaaccctttggaacatggattgggggatgtggctgcccggtacgaggacgttgcgcttgtggtccattagaggaagattcttcacgttttctcttcgcagaattatcaagagtgttgattggcgcggttgaatttgtggctcgaacaacaggaattttggggttgtgtcctcctagttgacgttctcgctgacgctcggtcgatgaatcttgacgttgcttgaggatatattcgtccctctccaggcgagatttctcgatctttgaaagaactttcgtggacgtgcagttgcgggatgagtgcccacattcaccgcattcaacgcatcgttcggcacggcaggaaatcttagtgtggccaggctgaccgcagcggaaacaggttcctcgagcatttgcctttgcttcgtcattgtcgcagttgtaagtaaaatggttggcgcttccacagatcccacacattttcgtcgggtctaagcccttggctcccccagaaggtccatcgggttgtggaattggggatgtaccgtggccagaggcagacactgagacggaggccgacgaaggtcgggaaattggcggtacagggggctcatagtcgggagagcctggagcttctgctgtgtcaaggtcgaccatttcaatctctttgtagccagtgaattgcggcttctccaggattttcacaatatcaccctccgtgtagacatttcgctcccgcgcgttctgaatgagccgactccagaactgaccctgttctagggactgcgagttacccagaacccagagcgatgacttggcacgggtgagaccgacgttcatacggcggatatcagccaagaaaccaatacccttgttggatgctcgcacacaggagaagataatgatttcactttctctaccttggaaagcgtcagtcgtattgaaatcgaccttcttcaaaatgtcttcgccgtatcgttgggtaaattggttcttgagctctcttagttggcccttataaggtgtgatgatgccaatcttgcccgcaaagtcgtattctttgacatctgtgatcaaacgatcatacagttgcatggccacttgtaactccgcgtaattgatcaaggaatgacccctggccgcagatgagtgcatgccctggacatcaaaaaatcggtaaggactgagaagctcgctttgatgccagggacgctggcgaagcttggccatgtccggtccatcctgcaacttgccatcatagaacgtcacactggggaaatgactgatggctgggtgcatacggtactggatatccagcaaatgcacgtctcgagggtgattcttctgcatgcggacgaacaagctctgttcatactggaacttggacgccatttttgacagtacagttggaggcaactgtttgggatcaccgacaagaacacacttcgagcagccgtacttcagcgggataagagcactgagttcaatacactgcgccgcctcatcgatgatgacggtctcaaactcgacattcataccctggaaaatttcatgtccagatccactgagagtagtgcaaatgacatgagcttcgttgatgatttgttcttggatccgccgtttatgcatatcagcattgcgggccagcgtatggttctggtcacgggccttatcaatagacgtgcttaattgggaccgtttctttttcatcaagtgaaattcgcgctccagctcttccggaggaggtaatccctttgctcgtgcctcatcgaggcggccacgaagctctttgaatgacgtatcagtcgtcttatgctcttcatagagcttctgcaagtcgacaccatttcctttgctaggatcctgattcagacgggcattgaccatctcatcaagggtaacatctaacacattggtgttgattgcgtcacttcttcctaaacgaagaacagagaccttttcttgccgaccatgagtcgtcctcacaccatccttcaatcgcatgactaactcgtcgacggcggcattgctaggcgcgcaaaggagaagtttctttgagagggagtttctcgcaacaggggcaccgttgactttgatcacctgtttcccaagcacgtcgcttagaagacttccgacaagcgcgatgattgttttggtttttcccgaaccaggaggaccttggatgagagtaaaagcgtcgttgtcgacagctgacttgatggcttttgcctgagcacgattgatggagtaattatccatgatgggttgcagtcttgcgtccgaataagtgagaagaggtgaaggcttagccaagacaatctcttcacacagatcatagtactgcaacgccattagggcaccatattcacgctccactgggatcaaagaagtgatcttggcaccccatgcctcggttcccggccctaaagaagacaggaacttgttactcccaggattgacccgatatgtgacctccatctttttgttctttcgattgacaccgcatacacgagcgagaacatggggcgcactcgggtcgcttgtgagtttgggcgagctggagaacatgaccaaatcaccttcgcccatgctaaaatccttgggaagaacaccaagcggctgggtgctgaattcgatccacgagtcgacagccaatcgggtcatgactttgacttcgaagggtcggaaagaaccttcgtccttcgcctgttgaaaaccttgccacgcttcaagaattaacaaaggttcgaatgtactctggtaggcatcgggtgtgcggaacgtgtttgagaccagggaataatcagtgcgatccgaggaaggaggaagatcgccggttgcgaaaaagtcccaggagaggattgaacggtgaagagaactcagatctggagccaggcgagcccgcatgtccctgacagaccgatggcgcttgacctttttgatgggttgctgttgaagggattgttttttgctcaattcgtaggccgcgacggcgtcgggtttcttcggtttggcaccaaagagttccttgtctaattcatcttcgctctcagaatcagactcgtcaccagaggaaaccatcatgctatctgcaggggttgtatgatctttacccttgataccaatacctttcaggccagagccttgttcagctgtttgctccccaacaccatatgcggtcgtgttctttttgagtctggcgagctcaatctgatcacgcttcttcttggcctccctttcccgttcgcgcttctcacggaaagataggacgtgggtggggtcattgttagatcgtagaggaggaactgacttgggaaacatcctcggagggaaaatgtccggacgattcttgagagccgttgaggagtgcattttggtggccttttcagctgcgcgtttggcttgggttgcgaggcgagccttgttgaattcgacagaagaagacagctcaagaagagtttggtcgttcaaagtatcatcatcaaagtcatcgtcactggtgatgcgagaggaggggctggaagcagagggtttggcaaaagcggtgatcgaagactgtttcttgagagcagcagttgaggcagtgacgacaggtttcttatagtaagcctccaatgagcggactaattctgccttctcacgttggttgagtattgttttgattgtgccattgacagccaccccctcaataaagctcaatgcatctggcttcacagtggtcacattcatcccacccaatctgcgtagaagttttgccaccaaccctacgagcgtcgttgccaagaactcatccttcaacctaagccattttaccatagcactcattgtggctgttggggacttgaggaaattttcggatgcagaagtctgccccgggtccgcattccctacagctcccaagaacacaccatattgatcaaaaagaaggtcagcgaactgaatcgtgtcacggcaaaattcgagcatgacagccttatcattcccccgaagatgccatgcctcggtctcatcaaagatcgtggtcagtgccagccacagatactcccaaagcttctgcagcgacacaacctcccggcgatcagcgagattacgagttcgcagcataccggtttgactgtcacataatatctctacgatgtctgtaccagtgtatagcattcttggggcgggtgcaaaagtcttcatgtgagatatccgacggaatgaccaactgagtccgtaaattgtggtcgtgaacgaagattggaggaggtgagaaatggcatctcgtcgagctgactggccactgacggccttgatcaagtcaaccgcagctgtataggtgtcatagtcggcggcaaacagagccgaaataacggcgctactagtatcctggctttggaacaacgtttcaaggtgctcgggtggaaagtccgcgagacgctcgatgattcgacatgagaggttggtgagatggccataaatcatattgaagtgggtcttctccttgttcccttctcctttcgtgggaaacatctccaagccaaccaggggcaagattcctaagagggccgaacttgacagcggcaggttatcccggtggaggtgcttgatcacagcatcccagatgggtgcagagtaggtagatactccatgtgagagcgtaccgtgcttcagaagtgcctcatagtcggtcttcaacgattgacactccaatgccaaagtgttgcgtacaacttccatgcactgcgtgagaatgccattctgccgacttcgctcaacatcaaaggtcggggggctgatgattgcgtcgattgtatcaccaaccactcccattgtctctgccaatacgatccgagttactgtaccccgggaagactcattttctgtgaagcggcgtagtgtttgaaggagactggccaaaccaatgtcaaagcagtgatagcgcgacagattgggatattgagtatcttgaagacggccaagtaattgcaatatcaagaaccgacaggcagacggctggtgagcacccttcagtgagccgaggaagggattgatccaggagagcatgtctttcaaagcggatttctcaaagggctcaccctcagaggtttccaggagaaaagcattgaattgtgtgttgtaaaatgcctgttccatgattgcttggggagagatggtttgcatagcatcccagaaatcaaccggggctttctcgaggaatagttggatggtgttgagaaggaatcgcaagctcggcgcaggtatggcgagatgatccacggagagacgacaagggtctatttccaaccctcgaagctgatgtgtaatctgctctttgtccagctttcggacaacaagctgcatacctcgccacaacctctgaatgactgcgaattgaggtggctgctgtgacgcagcccgcaggcccatcagcaagccatcgcgtactgcccaatcaaattcttgattagtaggaggccgcgagtatcttgtccatgactgaacagcccagaagcttcggaattgattagaatcaaaaagaaagcgagagactgcaggaatataatctgaaactttcaagcttcgctttgtttgaatgagtttgaatggctcatcaaaatattcctgcaaaaggctttcgttgcgcagcatggcttcacagctcagggtctcgaagattgacagcaatgcagccctgtccaagacatccaagctaattttctccaatgggatttgtttcaactgggtcgtggcggttgtcaagttacgagtgattctccgaatgtcccactcatcgattctctgggcaaacgcctcaatatcatcttcgtgatagttctcctccttgagcaggtccatgagccagattttgccgatgtaataatgcttaatgcatagatcacatttctccagagattcgtctagttttcccaggatccagttctgatcgtcttccacgccatccttatggtatgccaggatgcgcatggacgagagaaaactctctcttcgagccgttgcttcagctacgatatccttgacggcctttcctgattcgtccacttgctctaaatcttcgtagcgtccatgatcatcgttgtctttccggggacagaagaggtgggtggtctccgggagggccttgagttctctgtacaagacacaatctggttagttccagctcgtttgcttgggaaggttttctggggcctacctaatcgcagccagaaactccatggcaattgtagtctcgaattgtgaggtagttatatcgaaatgacagagttcggtgcatttccttcatcccatgggcagagcagttagaacatcgttttgtcgagaagtaacactgatctaaaagtgattccacgacctttgactcaactgccgatgagataatcaaatgacgtgtcaggaggctcaagtgaaggacaaagtgatgttgatagcagcgaggagtggcctcgcaaccgagtgccgtatttgaccacgatatgctgatacttcggcgatggaaaggcggcggtggatcggcgataatatttaaaacaccttctgcctcaaataatgagactttatgtttagccaaagcaaacgagaaggagaagatagcgaacaaaaatccccagtgcaaatgccggatgccgaagtatcattggcagattatttgggcggtgagattgatttcaacgcgtagacgcgctctattttacccaactaggacactactataatcaagactgcgacgtagcgcaaatttccctcggcagctacacctggaaaacacataacagtgcaggtaggaatcttaaattgccacattaagtaatttccgcgctgggggcattgaatagaatacatgaatgagaaccctatgccggctttgtccttttgatagaggaaagaaacaaaacaaatgaacaagaaccaaacgcaaaaagatcatccaacaagatataacatccagatgggaaccagacaccaggaaaccttcaaacgcgggtgtcatgcactttgcagagacagaaacgcttttgtacaagggataaataccataggccagacaggcttagtgagtgtagggcatgcatcggaaaaaataaaaataaaacattggagacagggtaagagtgagggaggtaaaaacgaagatcgcccccagcatccgactgagtaaacgaccaaaccagaacgcctgctttctatcagggaatataaaaggctctcaaaaataaaataaaacaccacagcatattgctcgtcaaataggaatggcgaggagaaatcacaaggaacgaaccagaagctctgatggggtaaagtcatcagtgacggttcatgaggctcaatgcaacgcaatatgcgctcctctatatcacattatgtacaggaggatcgtcagcagtccggaatgggtcctcatgttgacggtgtggagtttgcgaagattccacccgagaaagcatggcagcggaagtgaagtcgttgctttgctcgaagctcggtcgactccggtcaaacgaatgccgtgtccggtcgggagatcggcgaacatagtccacggactgtggtcgcggatcatggtcaagactggcggtgtagttggtcccattactgctgttttgactgcgggggttgtgggtgtttgcggtcggggccacggatgcagcatagaagggccgctcttcatcagtgtcctgcttgatggcgggctgcactggcttcactatttccgaagaggtagccgattcatcactgggagccacggccttcgggcctccctctttcgggggcattgggggatcttctatggcgtccagatacttgaatttgcccatagtcacttgctcgcggatgatatcgacatcaagcgggaagaacaccttctggatggagttgtacgtgaaacgcggaagcaagcaaaccacgacagtcatcaggaggacgacccagtaactcaacgagccgtaaacttcagcagcggaatggtagaattgaccagaggaagtgaaggaggtataaatgccggtccacacaaagatgagaatgctactgatggcgttgatcagagacgtgaaccaatcccatcggtaagtattcatcataatgtagatattactagcaatcaccgcacaggacgcgactagaactccgatacgggctcggtcattgatattgcgtccagtttcgttgacgaagtttgctggcgcgaataggaggtaaggcatgaagaaacaaataattgactggtacatgccatcggccatgtacaacctgtccaagttagtatgtctcgaaacatctcaagagtttgggggaggattcaaagtaccagaacttaagttgcgaccattccttacgctcgatacctctcatgtacagttgagggacagcaagagacaccttgtcgtccacatcctgatcgaagatacccatgaagattacaggcaatgaagtgaaagcgaggttgaccaagataatgtaggtatagtcgaagaggtaggagcaatcgaagtcgttgtagatacagtaccagaaaagggcgaacgtccacacgagattctgggaggagtcagtggtaatacagaataatagtcaataccaacgccacataccttataaaagaagttggccgtgcactctccgaggcgacggtaagaccatctcccatgcaccaaaagaaggcgctggaggtaccggaactgaccaattgcataatcggatgacatgacagcttgtctaccttcttcgccagcaataccgacaccaacgtcggcctcttgaatcatagccacatcgttggcaccatcaccaacggaaagagccatgatgttcagcccgttcttgaccatgttcacgacggcggctttctgtgcggggctgacacggcagcaaagaacggccttgcactgcttgcagagtaggaggaatttttgctttaagtcatcggagagcatcagcttcagggtttcaccatcaacgaccacggcatgtgtagcctcgggtggtgtatgatcagcacgagcagcaataagttcctcgtcagaaccggtcaatccgaaagtttgcaaattcttgtcgagttcgtcagaggcctgctggtgttcagtctcgggaatgttcagcacaatcagctccatgttgttattgagtaggttgcaagaaaacccaatgttgatggcggtctcaaccttgtcaccggtaagaacccagagtttgataccagcgtccgcaagaagctggattgtatcgggcacaccatcctgaagtctgtcctcaatggcagttccaccaataagcatgagctcctgttcgatttgactagaaaccatctctagtttctcctcacggtctgtgatcgcagcggcagcgatatcgtgttccttagcccatgtgtagtattcatcctcactaagcagtcgatcggcaacgcacaaagttcgaagtccttccctagcgaactcctccaagtgctctgcagtctgtcggcggagctcctgttgtttgccacgggctagacgggagtaaattatactgtccgcacccttgcagaagaggcgtatagtaccatcgggcattcggataattgcactcattcgttttctagatgagttgaattcaagggtgttcaaaactgtatatgtgcgttcctcgcccatgacattcaggagaagatcgtcaccggctcggcccaaaacggtgaatccacaatctcgagcagtgctgaccaacgctgcctcgtcaggagactgggccttaaactcaatttgaggggggtcgccgggagtatgctcggtgataacggtatgacacaaggcaagagccagcatgaagtcctctgtacagtgcttctgccgctctccggattgtcctgtcaaatcggccacaaaattcggagcaacgaacgtcagttggtcgtcgtgcaggtaagggttgtcatgaatcccacgcaacagacccaacattttctgcgcatcggcagcaatttgttgtcgagccactgcggcctctgcgtcagcatcagctccctcgcgacgccgcatgccaacctgagcttctgtgtaagcctctccatatgccaaaccgttgaccgtacacttcttgaactccatcagattttgagtcaatgtaccagttttgtcagaaaaaatgtactcgacttggccaacgtcgtctgaaatgttccaagacttagggacacaatagatccccagtctctcgtagtacatgaacagatcgttgttgatgaaaagcgcttggatggtccgaacaatttcaagagaaatataaagcgaaatgggaaccaagttttggaacaggatgagagcggtccaaaaggtgacaataccagtgacaggtggtgtgcctccgtaggactcaagatcaaagtagtctagagatttgtctggcctggcccatgcgattccattcacaatacctgcgacaatacacatgaggaataggatgaaaaagttgtaaatgacgttccaattcagatcctttgccatgcgaggtcgttttgccggagtcgcaccggaattgagcatgatcttgctctctccaccggtgaagaggacaacacctaggacccattcggtactcttcaaattgcacccacggagcaagatgttgttgatagagatgggctcaaccatctccttccggggagcttcagggaaacgtggatcgcgctggtcccaacgtatggcaccattgtaagtgtacaggttggcatgcggggcctcactttcgatcacaaactcggccttttcgcagtctctggcgtgtcgaacttcatggccacagtgaagagcttggcgaaccttcaaattggtttctccatccaagccttttgtttcgacataacatgcgccatccgggtcagaagtggacagaatcacgacatcggctggaataggatcctcgttgtacaaccggacaaagtcgccaacttgcagacttttccactgctctcgcttgaatcgggccttgccgggtgtctgcttggacatgtccaggatggttccatgtttcttgtccggcgttggctcaacgacgctctgtcgagctgcgctgttcggagacagatacttgttttcagggttgctcacgatcggccaatcttcgcgagcttcgggctgaggcgatggaacatcggtcatggggatagcgatatcttcgggggctaaggagttccgctgcgtataaatcgaggaccggcgatctgctgtactcaagaatgagtcgcgtctttgcccttcatcatcatccccctctttctctttcttcttaaattgagaaacaacccacttatatgaggcgatcgagcccctggtacaagccttcttgacacgacgccatatatcaatgttgtcttctgtcgaattgacattgttccattcaaccagtctgtaaaccggagagttgttcacttgattgtcagacactgttctcccccaatcctcaatggcatctttgatagcggtcacaacgataataacgattagaggaacggcgttcagaccggggttgttggcgccgaaaattggaaagcactagaatatcatcagccaatgccaactggggtggaagccatggaaataagggtatcactgcgtacattaagaatgatgacgaacaagaaatagatgttcgcgatgttgtgaaattgtagccagatgttgtagggaacaaaggtgagcggtgtatacttggccgtgcgaattttgtttctggggtacgtgatgcgcaaatgaccatcctcgtctcgttcggattccggaataggaatgctgaagtagattctccgattcggtccttcttgcgggatctgagattcgctattgcctgaggtgcttgtattgttcgattttcgcttttcgtctttcagatctgaccgtttatggaagcgatcgataattgaaacacgtttcttgacgccaccatgtccgggcgctcgtgtggtagcccatctttgtcgtttagtcggcttggagacgtggctgttgacctccccgatatcagcaccttgctcgttgttgtccccttcatcctctccattgtctccagggaagcgcgcggaagccatctaggctattggtgcgcccaagaagggcataaaactcgatagaaaccttgattattggtagctggctagcatccggtttgaagggccggaatccgacagcgctcggcgcagagaaagattgtcggtctgagtgcgttcacaggggttgaggacgatggaaacgcaaggtcataggcgatataagtctcgagaaaatcaggggttctatgtgcgcgtgtcgaagatgttgttgtcgaccagtttcgaggaatcgtccaaaactattcaaaacagggtttccgcggctgatcgtgatggaatatgattgcaatgcgacagccgaagggttatagggtgcacccacaaggggccattcaaaatactgaagggaaaaagaaagaaagagaagaagcaccaaagtagttattttgtgcttcgaggggtgggagaaagatagagtagccacctgagcttaccctcgtatggatctcagtacgggagagtatgtaatctcgttaccacccgtccgtgggtgcttaccgatggggccgggccaaccttccaaggaagatacctctgctttgtcattcaaagcgggcttggcaggaggtttttacacgcgtcgactgttctattggtataatttggtatgatatgtcttgcgtctcttttacactgcctctttctcttgttctcggcatctttaggcatcttcattcgtgttggagccagcacgactgcacaatcaccgagactcaaggtaggtagccatgtatatgatctcggactcaagggacaatacatgtaaagtccggtatttataatgtccagccccgttccgacctctccctgctaaatttctgactgtggcaatcggggtactcggcacttgaactatgggacgagatattgatatagttacggagtacatagtattgatatttaatcgctaagagacattggtggattcgtgtttatttcggcctcttttcactagtgcgcatcgcggcactgccaccgtcagcattatgatcgcttacaactaggcttaacgagggattacctaccgcgggtacggagtattctccccagttcttcactatgaaagttgctccgtactccgtacatatccgtttgatccgtatgcaaactctggagtaacggttattattggcccaccgcggttgttttcttcaccccactatgaagtattaatttaacaactggccttttcttgcgttgcaggttttcctagaagttgtagggtacagggtacctcgggacgcatcgatattcttactaaggcgaattttctgtcgtggcagtgtccatgtaatcgatctatatcctatcagaagaatcagacagtattgtgaccatggatttcctttttttttttttttcttcccacgcctcccctaatgatatcagagacccagaattcggggtcggagcatcgatcctgaaaccgacacggcacgagcttcccggtccacctgagtcagcttcccttcactctgatagttatgttttgggttagtatctgccaaattcccaagactgttatgcatatgggtcaaaccatcattggacccgttctctcatttttttatgttaccgtatgcatccctccttgtttcttggcaaaaatagaaaaaagaaaacccttggcttcaggagaatactcctgaacaggctcgatgatcggcgtcctcgtaaaacaagggttcgcggattgcccgggactcgtgttcccctttcctgatagccctaccaaatacccacgtatcacgggtgtgttcctctaaaagcttcgaaaccagatctcgaggcaagggtcttaaagcaaaagcagttgcagtactctgtacagtagtgcaacgtttgaatggcgtgctgatacgacatatgtacatttcagggtcgtcacccggtcgaccacgaactatagtagtgggacccgatgtttagcgtatcgtcgctttagataaagctaattggagtgtcattttccctacccgttactccgtagactgacacagtaaaaatatgtatcagaaagaatcggccatttccatcgcaagtttgatgtcgatcaaacgagatcagtagtaatcgatagtagaccagatcaaccagagatcgccgccactagggatgtggctaccagatctacaatctacaatacgataactaacatacttggtagccaagtatgttttcgacagttcaaggtatgtactcccaatgcacacaggtcagttcaatatcaatttgacctcgatatgagttcaattagtcttaaagtgtgggattggatggttagcgttccgaaggttaaaaatcgccccgtccaggttccacctgagcaacaaggtcaggaacaaagaaagaccgatgagtcagcatctcattgtccacggctgacatcgcgccaaatcggcgcgttcgacgcgatatggctcttgttttttttttaacgagaacactcaacatcactcactcatcatgcagaccataaaagatttatggcttaatagacctacattcgctcatgtcaactcgaacagcacacctgagacgaagagtacacctcagatgaatgaaagcgctgaattcgcgaccgaatcctccgaccccccctcttcctttgcatttgatcaaatattaccacaatctgaacaagatgctgaggcccacctaaatgcggcactgtatctgtcaactcaggacaccctccttcagtcccctacattgcatcaaagtttccaaagtatcgactcagttaccggggtctcatctctgaataagagcctcaacggatctcagcgcatcatcaaggatggcagagaggtagtaatcagctcggatggagaagacacagactcgatatgctcgttggaggacccaaagaatcttttcgctccaacgtctaaggacctgttcacaccggccaaattcactcagaggatatcatcgccaaagaaatacaaacacaacattgactctctagttcatgatgcagtggatgataatgaggtcgaagccagcgtagctcgggcgaaagccaattatgtgcagaagcaaccgaacggcatggagcacggaaacggctcgtccggcaccgctctgaatgaaaccatgttgatctctgctcttggcgagaatgaagacggtgttggaggtcaacgtctgataaatgctattagaagaactgatgctcttgaccccggccgcgcctggccattttttgattgcacacagacattgccgtcagccccccaatttccaagtgatctgatcgcacctgggacgagtatggatatattaaggggtgagctttaaatgagtcgttcgctgcttctttccatgctgaccaattgtagaatctgatactcgcgagcgccagttcatgtcaggcgaatttattcagatggctttgtccaaagggcttttgccggacgaattcgttctgtggatgtttcgttccagttcgtctcataccatgctttgcttattactgtcaagctaacatgcctttcagtaccctatgaacgccgagaggaattgagcaatgcctattaccgaattattaaggtttgtagatgctcttatatcaaacccccattggtattaactaattgaatatataagaatatggatcaggaccgcctaaagctgctcatccgtccggccgatatcaatgaacttttctcacgactaggtgctcggagccaggctttagatccttccaaggagattatcccaattccttcccaatgtatgatttgactatattgcctgtggctctggatcctgctaataaacactgtcagatattactccagattctgcgttgaaagaccatgcaaccttcgtttcagtcctgagattacttagagaaactgctggcttgtgagtttccactccctcaaacccgcgacaatgtaatgcttacaaaattgtagattcgcagaagacacccaagagcaagtggtgctcctactgctacgtcttactcttgatgtttcgttaacagcggattctacggtatcgtcggagcttcagtggaccataaatgctgtcttggatcctgagaatttccatgaaaccagtgcccaagattcggtaagtaatctcctatatgttgtaccacgttcaaagccaacgataccagttacgtcgagtttgcgccactttccacgccacgatacacgatgtttgcatccaaagtcaagttgtgcatcatatcctacccacatctccatggtttgcactgataagatgtcgcctggccgttgcatttttactacggagtcccggtcctctcaccgaaccccctggagagttgcttgatatcaaacgtattacattgttactgctacgggatgagcgtttccaagttaggcgattcaaaggcatagccgactacgactggagggaattaatttcactcactgctcttctcaacgtcgcgattgattcgtctgcgctagcgttgaatttcagcagtactcaacccgagaaagactatgacgctgccatcgacaggctggcagctcagatcaaaatgatattttgttctattcaggattccggggcctcacatgtgacacggacagtggccaaaagtgaactcgaggccttgcattaccgaattgtctattcggttcggtccaagccaccgccgaaaaccactattttcgagtcacatgtaaaggagagagatggtaacattcggagcattttcagcacttttgctgcgcttgctgctgaaaagcagaatcccgaggccaagcaagaaacgaattcgtttgcggcgccaggcgacgcggataatggtgacaaagatattcccatccgcgcgcatgatcacgtatcctgatcacattggcattggcagtttgagtcccaaaatctccatttcactgaaatgggttgatgatggaatacccgcccagtttttcccgtctgccaccactctgacttacgacccttatgatcatgactttgagccaggcgttttattacagtataccaatgtattcaagcacgtatgtagaatgagagcaatcgctaaaagagttcggtcatattccaaaggagacttgaactgtgcaaagaaatcccctctatttgtgaagatggccaagagagacaaagattatctgaactataacacacgaaacacagcagtcgcaaacgtgaaacccaagacagaacaagtgatacacacttagtcgtagaatttccggttcaagttcttgccaaagagcgtctctcgcactgcaggaagagcatcaatttccagcagccgcagacgctcctcgaaagtgttgttgatctcaatcttgccttgcccaccgacaataaacacaccaccagcactgcgacctagttagtccccttggcgtatattgagagggagagcgaataaactcacgatccttctggcaatggctccgactcgtccaaagtcacggtcacctccgagccaacatggtccttgtactccttggtcgcctcctcaatagcatccttggtaataccgaagtccttctttcgcgagcgaatcgcaacgttatcctcgttcagataatacagaccctcgaggaccagccccttgagcatggcctggtacttcttctgatcgtcggcagccaccttggaaaccttctcacgggcattctggaacaactcatcgagtagctcctgacggccacccagcacgcggagtcgggtcttgttagcgagtgtggaccgggtgatctgctgggacatggctgcctgcttgaacttcttctcgtagagggtatcgatggccgcagtctcctggcgcacgagcttggacttttcgatagcaaactcttcgtcggccttcaactgaatctctcgggccttctcaagtgcttcttgtttgatgaaggcggtcatcttgcggagctcgcccgcgacctggattggatggccatcagtccaactcaagcctcccaatacttagagtaaacggcgaacatacctgatcatctgacagagcatggctttgtgacattttggcggttcactgctgtatcgcctgttggggtggaatgacgtggggaaaagggaaaggatgttgtgtccaactaagctcggattgcgttgccttggcgttccgcacccaggtcctccgcactcccctcgacaacttgccatttcagcgcgatcctatcgttccctataattttacctgagctatggcttctttactccggtagtttcttctacttgatgcgcctttcctatcccttgacccgaccaatgcacgatacacaacatgggcaatctaggtgacttgtcaccggagggaagtgttgcggtaagactacggaaatcaggatatacagcgagataagatccaaagctaattatgtatcaggttggtgtaatcgttggactgatatcaaccagcctccaagctatcgggctcacgctccagcgcaagtcgcatttgctcgaggatgagaagcacccctacgatgtgcgcagacccccctacaagcgccgacgatggcaaataggaatggggatgtttgtcatttccaatattgttggaagtaccatacaaatcactacacttccgttaccagtcctctcgacgctccaagcggtcagtagttccccctccatgcatgccggagattggttgctgataggaatgccgaatagtccggactagtgttcaatactatatttgcgaccctcatcctcagtgaaccctttacccgatattctctcgcaggcaccgttctcgtctgcgccggcgcgttgttaattgcgaccttcggggccatcggggaacccgcacataccttggatcagctcctggaccttcttcagcgacggtcgtttcttctgtggatgggtgccactacactcctggttgtcctggtacttgttggtaccaaaatgctgaaactcttcctaccgtcctcacgcgcgaaaccctcggcctctggtcatttttcaccacatctactgcgattgcaaagccgaatgagattgatccgcggcatgagctatggatttgtcagtggtatactgtcggctcactcccttttgctagcaaagtcggccgtggagcttctcgtgcgcacaatggtagacggtgtgaaccagttcaatcgttggcaatcatgggttatcctgctaggaatgatcttcctagcactcacacagctattctatctccataggggcctgaagctgtgtagtactagtgtactatatccttttgtgttctgcatctataacatcattgctatcttggatggcctgatctacttccggcaaatgtcccagctgacgggcttccacgccggtctcatcgctttgggaacaatgattctcctaggtggtgttttgtgcctgtcatggcgacttgaggatatcgacactcataccgctgtcaccactttgggttccacgcaaaccggacttgggccgggtatgggaatcgtggaagagcactctccggcatcacctggtttgctggacggtcaggatgaggaatcacagattagagaatgcgagccacttctcaacccgaaaacccatactcgccatctttcatatcagcggggaagagctccgagcctgccactcaacttgcattttgatcgcgactcagctgatataaaccccgcatctatttgggctgaactcgacgattcggactatgaatctaccgatggacacaggcagtcctccatagatcgcctgcgtagcgtcagtggtagtgcaaccctcaacggctcattgcggggtctgacacggcaatcgacggccggcgctattacacacgatcgcgaaagaggatctcgccgaatccaagaaacatcacgtgaggacccatggcttcgcacctcaggacctcagagtgggttatcggccgtccatcgtaaacgtcggaggggcggggatccgttcacctcatcgtctaaccaagacatcggtgggtacggaaccatccaaggggatggcgatgatactcactggcgcggcgactcccctatcattcgttcgtctgccaggtctggtcttcttaatggctcaaaaagggctctggcaggtgcctggaggtttgggagacaatatctgcctcgatggagtagcccgccggctgggattgacccagaagatggctcttcctcatccctactcccccactctggcgtccctcttccacgaacacactatccacagggaatcccggttcctgaatctgacacctttcggccatcgtcatccccaaccacctctatataatatcaatcttcgctccaacctataacccttgccttcaggacactaccacctcgggcttctctttgcttttcgcctttcaatgcctatgtacagcggtccctcttccttggacataccgcaatccacttatgttgcttccgtcgctcatagctcgcggtcgggaaaagaccattgccggtctctcttttgtgttctgccatccactgtctagataatatgatatgataccacccaatcgatgatatagctccacgcgaatgaatataagaccctgatacaattcccgtgctctatatgataatgcagagattctaagaacaccggtcacaatgtctgccaaaagtcccttggctgtggcactgacctctcatatgcaggtccgcgatcctttctctctacatgcacgccaaggtatatacgtctttcggtttgaacgtagattggccagatttgggacaaagtaccagcccagcagtcatgcagaatatcaaagtaaagtgaatctcattggtatggaaggttgggaatatatctgacaaatcggatcgtattgttcgaactggactgaattactacccgagtgtccagaggccgttttagactacatggtctaacaagtacccagaaagcgagaatatacttcccattacgagattcggtatcctcttaggctgcatatcctagcgggaccgcactacatggttggaacggagcaggacccaagtctaccacagaccactacgaatacaacaagcaacaaaacaaaccaagagaacagaatccgattgctccgtaccatacataatgtaactcagccatgagccatatcggtgcgaagtccgaaccgaacggcgttgagaatccgtcataaccaagacagacggtctcgtcatggcatagaatcaacagaaacaataaacacacacagcttgagattagacaatgaggaaaataacataatcagtggacaaagaaataggttaaaactataagagcaaaaaagaccacagaggaaaagccacttcgccgacgagtttcaatgcaccacgaacacctccatcctccgccattatctaggtagaggggggaaaacaaaagccaaatttgcctgcttgcgctctctttctcttttcttgaagttggtttcttttttttgacggacattttttttgcgtaagttttttttggtattggaaagccatagttctcagcaaattgggggtctcctttttccgagatagaaggcaatatcaaaaggataaaccagatccaatatcatcaaagagagaccggaaggcgattccagcgcggtgcttgacaatttacaaatagtctcacgagagtgccctgtagaatggcgcatgcagatacagtacgaccatttccgagggaagggtgtgatgatggatcggcacagagggagacgggtatcaaatgaacgcgagatcgaggcgcagggaggaaagaacagagagaagaagacgcagcatcggggacctttagcaaaaaggaccccacggatcagatcataattttaagcatttaagcagtgggttggtgctggggcggcatgcgaccgccgaccggcatggggtactgaccaccagcctgctgttgctgctgctggaggttttggtagtacgccatctgctgctgctgctcgttggtcatgtagcctgggtgaatacctgggcgcatattaccctgcggtgcgttgacgttgttgtgagccacatcttcgggggcctcgggggcaacatcgggggcgtcgacaccgttctcactggcggctgggtcgggagcgttgaggcatgcctatcaggatgttaatggatgaaataatatcattgaagtagaccatggcttacctggatgaggttcttgccctcggccttggtgaccagcggctgaagtttgggggtagtgaaggtgtagacaagaccggtttcagagacgaccaggagaagaacttgagtgccagtcaagacagagagttcataggcctatagagtccgatggcgattagttaaaagtcccaatcgatccaagatagaggaaaaagcctcgatcggggaactgatgcggagggggcctcgggacgcgacgcaccttcttcatgatgccggccttccgcttggagaaagtaatgtgccgacgcgacttatcctggataaacttgatctcgatcttgcggcgctcacgaccgggcttgtcatcatcatcatcttcatcatcggcgctcatgcggttgcgcttggtgccacgggcgtcggcgccgttgccgggaaggtcatcgtgaccaggggaaagcttttcatcaagaaccgcagacatattggcaataaagacgaacaaaagcgatttaatatgggggggggtggttatgatttgagggggggataccgaaaggggaaggcaagagatgacccaatcgagtaacgcgtttataggatgtgagagaaagggaatgggggaatcgatgggggggggggagagcgaagaaggcaaagtgcgagttgcgatgggcaggcggtctgttacgtggatcacgtgtacggctggtatgagtacaatctgtacggtcagataggttagagtacttctggtactgatgaagtttctatgagacagaagtaccgcgaggattatgcttgtattgtcttgtaattgagcggtattcgcctcctccaggccagacacgattcttggctctgatcgcttattggctgatttcccttcggcccccccgttttccgttttttgcccttttcccctctggtctggactctttttcctttgttgctgatttcccggacggccctaattttggttatttagcccttttggacttggaatcgacggtaataaatacgaaatattgagaattaagaattaaaagagatatgtttctttcgtactttagtacttcattccatttcacatgccgcgacggggcagaacttctcaaggtccggtgctatgtgattggccttgaaacatgccatatgagcatttctatcaagacgctatggtcctatttcgaggttacatctacaaagtcgaatgagtataaatctgtgctcgcatcacacaagcgcgggtcgcacctgctttgtggcacgaaataatggccctgtatacagcgtactcgcatagctgcattcagagtacactgtaaatagccccaaagcgcatccatccctgtcaccactctcttatctctcttatagccattctcatcccctttctgattgcaaccacaagaaccgacctcacattcatcagggcaccagagtacggagagtactaggccacggtctcgacacaataatcccaggcatttcagatccccttgcacacacatgcataccttacatagaaactcgtagagcccctagggatactattttggggtctcacggacgtagatttgccaaggtacacaacaatcggggtggcttggtcagtaggccttataataaaagttaggaatccagtcagggtaagtttctgcctcttctattcttactcatgttattactcccacgtcgacggaatacagatgtacaatatctgcaatttcttcgttgatctggtttgatattgctctaagcatcaagtcttgccataacccccacctcgaacctgcccaggtgactaccacgcggccttaccgaatggcaggtttcttggtcatatcgacagcctcgagagcgaaggtcgaccgctgtcgactgttggtcatcctactgaatccatataactagcaacaatatgcaaccagagccgatcaacgggccgatccgaaaagccctagacccgatgcagcggagtctagctcgctcgcttcaaggttacttcctgcataccaaaaaaatacctcgggcaacattggaatgacgaaaactgatcatattcttcacataatgaacaaaggtccaacgctaatcaccaacggagaccccaaaccgggtctgctgtcaagtctatttttacaaaaaggatgcaaggcatagggcacaaaaagtggcttctcccaaaagcgcacttgaggccggaagacatggaggaaataggaaataaggaaagataaaagcaagaccaagccgattaagtgtggtaagcctcggccaaggcccgcatgggcctagggataggaagaccgtaaaggaaagccacataacatttcaaaaattgagatacaccgtcgggatatagagggaacacaaagtcaccaggttcctgcaccgtactggactccgccaatgcaacgccggataaatgaaacagaaactggaggacgcggagggcaagtcacgatcacgagtctcatccggaaagaaaatggctgttgggttggtcgattttgcaatcatattgggctggtgtcgtgaagtcgggaagaacaaaaaaaggaagatgtgtagtatttgagaaaataagaaaaagagcagaatcatgtgcaacgaagtgaagaagtacgaccaacagtcccaaggaccagcctcaagtagtaacggtgcatttttattgctggtaagtgccgcgaagatgatggtcactcacaccaccgccaccaccgcccttgggaccgagccagactatctcaatcacgctgtggccctcatcttcttcgcgaacatagaattggtgcacgttctcaccgacaacgaatgcatcacgaagcaaccaccgatccttagcaacgccatcttcctctgcgggacgcaagggacccaggcggtcttcataaccgcgggggtcttctggccaggtcttttcggtagcatcaaagttgatagcatcatccgccacattctcgccgtacgtatatttcaccagcgagtagccgttggtcataacccagaagtgacggagagtctcaccagtagcgctcacagactcctcctggtcaaagacccagcgacggagaacagatttgcggcctgcagcagcagaaacggtggtcatcttgaccacgtccttgctgtaccaactgttccagtggtgcattgattcgatcttgcggcctgactcgtaaacaccgtccacggggtctgccatgtccatctggtagagcgaaggccacagagtcaggggggtgtcaccgaaccgttggatacactggccaagcttttggtcaccgggctgctcgccccaggactggcactcctcgtagtgcttcatcaggacatccaaaagaggcttcgagacaaacacaccggcaccaccgaatgcaatgtggccgaaagtatccacctgccagctggcctcagacaaagatccaatgtagtgcttcttgctttcatcgaagagcttcaattcctcggcgatagtagggagcgacaggaagaaggtatcgtcgtcactgaacccaacccaggcggtgtgcgggcggtgcttgcgaatgtgctcggtgaacgcctcgaccataccaaagtaacgggcagtgaagtcgagaggagaggccttgagggtcaagtccagaccgcggttgcggaagtaagtctcttgcttctccaggtcgtcgtcagactcagggaccagaacaatcagaccggccttggtgtttccgtatgagtagagcaaagagggtagcaggcggtccaaacggtcgactgtagtggccagaccgaaaagaagcttggaggtttcctcgacatcgtcatcggcggctacatcgacgtcgatgatctcagggcagacaaagttctccggcttgttctcgggagacacgaccataccgcgctccatgacaaccataggcgggagtacaggcttctcgatttcctccaaagtgtggaactcggtgcgagggttcacatgacgaggacggaaataggcgcgagtgtagttcttgcgtgggagccattcggggaagggaaggggggcagccaatttcgggtcagcctcacaggtgttactggcaggctgctgcgaatcagattgtgccgacgtttgtacttgaggttgcttgtttccactgaaggaggcacggtcaatcgggtgcttgaaccgaaggaaggctgagcggtcgtagcgttccatgcaaaagaaaaatattccgatggtcaccagagccaccaacgggaataccgtcttcatccgaaatagaggcattttggctcttccagtattaaatgacgacttttcaaacatgtaaatagaagcaggcgaggcaaaagcgaaatcggggcagatgaaccctgtaattaaaagttatgggttcgggcgtgcgagatgtcgtatcccggaaatatcgtgcagaaaaagctggtagcaaaacgcagtttccacttgagagaagggtcaaagaaacgagtgtctccagagcggattaaagagtggcaggcaaatacagtgccgagatatttcaacgagaggctggcagcgtcgggacctgcgacacggtccaaaggggggaggggcgtttgtaaagggaagtaggaggactggaagagaatagaaaagcaagactaacgcggctggacgatgtgcccagtccgagtgaaaagtcgatgagaggatgtaggattgagtcgtgaagttgttgtaggaggaaagaaaaagggaggccgtcgaagcaattaacggggacaggttggccgtgtatgggtattaccgtaatatattatttagatcttttctttttttcacttcttttttcaatccgttttctacatcgatgtacatgtctacatatctgacgttcgcgccatctgccgtttttcgtttaatatgctgtcttcagtgatatttggttatattggagctggatattgatatcttggtattcatcgcccggttgcggtgtgcccggttgggatgcaggaacagagccctgcgataacatcataaatgatatgtggcttatactttgtttcctttgcttcgttttgccggttggacctaagtgtcgatcacgacggaaaaaagaatgccgttggctgggagggatcatctccctcccagcagcttcagtggaatacgccgccatgaaaccggtgatcagcactggggttttttttgcatatttttcccctgtctcgagcacaacaataatgtttttgtctaacctgggcacagatgtagtccttcaagtcggaaatgggcatattgaccttggcattccagaacaagcatgtttcaagtatcttcaacgttgagcaggctgtttgcggcgaggatgcaagctcgcgcgaaggtgccgatcagctgtttgtggcatcatacataaatttgtacgatagaccagaaactcatctctactaataactccgattgctctctccctagcgtctctacatgtatatgtatgttgcacggaataatgagtacttgtatgtacatatctgcatatagatactactatgtatagatacactatggatccgaattcgtcggcacattgcacctcactgactgcgcctgaccctcaatcatccagcaatggacaatataagcgactacctaggtacgacatccgttcccatcctgagaccccatcatgatgatgtgaatataataaataaccacattgaactagaaatcacgtcaccgttatcaaggtagcgcttggaccatcgaagtaaagtccggagtcttggaaagtgtgctaactacgaactacaatgaccccagtatcaaataacggaaaggacaggtatacacaattgtcatccatattaagaggcaaaaaaagagccagggaaatgatccagagacgatcgccctagcaccccccagccgcgtcaaccagtcaaaattagccggaggggcaaatgaggccgacgccccccacagacacgcgtccttcctgacgacgttacgacttgtgtaccataatgatgggcgctggtacggagtatatatgtgatatctgggtggagtttcagcccgtacctaacctgttattccccctgttatgtattcgtgtcacccagggatgctccgcaattcgcacggtatattttccaatgaaaaaaaggagagaccctgaagcttatcgggtaacgtatttccagtggcgatagtatctcttggtccatggatttcctcacagggtgggccgagatcgacaaccattgaaatggccctggtagtttctattttgatatattgtacgagcggctcaaattcctcaatcaccatcacggctgatgacgggcctggttttgtagtctcagcatggatcagcaactcggtcgacatgatcgaatctttgatggccttgcaaggggtgaccgatcgctctgcgataagtattcgtctacagcccagcggtcttgagaccccggggcggatcttcttcctgactgttatttatgcacttcctatgtcggaagatgctgggccttttgttggctcctgcttttcgtggatgatggcaacgtggaccttccagactttcgagttcgctctagattatgacgggactacgacgagcttatctccacgggcgttgcgcgttacatactcttcctagagtttaatcgccaagacttcatctatagttaatttattgatttatccaagttggcggttgctttgattcttactctattgaatcactttaagtaccagctatggaatgccgattggtcatgtatggacaccaacccgggaagaagacattgatttctctggaatcctcataatagtcagaggttaagtctcccttggtagagagccagtgcaagggttctccctgggcgctcaggcctctctccttgggtctgcatgttggtcttaataatctgtactccgtaagttggttatggtgctcgactttgtaccgagtcctttacttatgtacgcgatgctgatagtgggatttctgtagactctgaactatttggtaattacgacaatataataagttagaaaataacagagatgtccaaattcctctctgtcaccattggcataataggacgggtactttgacttctggattttccggtgaaccacttacgaccgaaggcagtctctgggacctggctatacgttgggatatcagatcccgtaggcactggggctggagattgagtcaaagttgccatggtttatacaggatattggaagaagatatataaatagaatatatcacagcgagttggagtaaaaggatcttgttatagagacaataacgtgcattggattgcactatatcagacagataggtgttttattaagatcgcgatatccttggttttgaaacagccgctaatacctacacggtcatgtttgtggattttaagcttgaatggtcgtcttggcattgtggtcacagcggcaaaagggggagatatcgcgctcaagtgtctttctgtcaacggtattttctgcatagagtaactactccatactctgttatagaacgaccagtgcatttctttttccgtgagtttggcgatgtttagtttggcaatacgccgcataaccttcactttatatgcatataaagtcgaagtgcctcgaactgctcgactttcatcctccgtcgcctcaccatccaccccattcgcctagacatttgagatcctagattgagtctaaaagcatacatatttccgagtacaatgctcctcacatgctcctaccgaaagctagtacatttggcaagcgcctgggaatttggccaccagaatatcttctatattataatatcagaatcttgacattcaataagttgcttctgaggctataatataccacactcaaggttttctggaagattgatcctggcccatacttcaagactgctctcggtcttccgaggattcgccatctgattcttcagataacttgcaagataaagcagccatgcttccttccccgtccaatacccgcgctggatccatagcactttgatatgctccagagtttgcaagactgtagcccccctccctccaagtcatagggccagtactggcacctttatcccatgacaaccgaaactaagagcctagtcagcggagtccggctataatgaccctaataagacgctcaaacactgcgtaattcttgcccctaactgctagatagagtggcatctgaccattcgggttcgctccatgatccagtaaaaaggtgaatacgagctgaagcctaccagcttcttgacgcagcataggctcttgtgcattgcccatggggatcctcaagcgaatatgaaatggattattttccagttgtttgtttaaactacaattcgcagtggtcgcttgccatcttcatagacatattccagatccaccccttcaccaagaagggctttcaccacgttgactcgatcatatttaatcgcttccgctagtgtagcttggtagttaccatcctatattgtgcattgtagagtttactctgtgctattatttccatacagagctagttccttttctttttcctataatatttctataataccgcgaagatatatcctggcttaaacggtcaccccttttggtgttcccttttggtgttcccttttggtgtttaaaaccgtcgactgctctgtgaatacttcgcctctcccccactctgatacggtgggctgacattcggtgggatagaatattgtacttattcatatccacaggataacccttcacatcacctctaggaagcaacagtgataatatgccacagtttcaatgtcaggtcccgggctgcacttcgatgtcatattcgtcgcaatcatgaagttcccggacgatctctcgctcgccccatacaggcctgtatgatatgaggtgtcggatgattaaagcacggttccaaggaggcttgccatgtacagtatagagtgttctttgaagcgaggcatgtgtatctttgatggtccagtgcgccccgatatcgaggtcgctcgaccagattccgaagaggaaccctgggagtacgggtggtgaagatgatttgatcaataccttccactaccttcctcgagaattccacccaagtatagaagaggtttgaagggctagatccgagctgatctcacttcgagagacaattgtggcaaagccatcggccaccgcactaaaatcgtgggttgcattttggtatggaaggaagaaccgtacattagcctactgccttctgtcgtggtaattgaaaccatgtgcggaaggcgcggtgtccccacgtgccgcacgagtataaaccccccctcccccccctctccccctctccctctccccttcacccttcccaactcctacttgacatgcgtttctgcattctctcccgtgcgtggtatgagttccaaacgtgttgttcggtgcagattgtatgaggcgttgtgatataccgttccttggatctgatatattatcggaccttgtatacatcgacctcccgatgatttttgtaccccgctgtattcataggacatcatgtgaaagaaaaaagtcggtcacaaacaaggacatatctcagctcgtagatttaaatgctgtacaagaacctggggtttcgatcgcccatttcttggatagcctgctctgagagcgatgatattttgtcgtcctccaatccctgggccctgcgtttgttgataacccggtaggaaacccacatgacaccatatacaacccccgcaaatcccaccattgccagagtgacagcgttcccacggacgaagcgcgggccttccgaattaggatacaagaaaggggacataactccgctgatgttgccaaaggtaagctgcaagccagttgcgtaggtgcgttttgcgtatcggggcagattggtaggcaaccaggcgagaggtaagccgacagcaacgtaaagtcccagggcgaccatcaaggcaccaaagtaatgaacacccgaggacgagtccgaaatcaagattccatagccaacgactgagatagcgcagaagagacatatgaaaaatgcacggtgttgggtgcgatcgctcaaccaggcaacgcacagataggcaaaggcacccagtgcatagcaagggattgtcaatgcctggacctcggcggtggtccaatttcccatgcctttgataatagtaggaaggaaggtactatatccatagagcatggtatcaataccaaactggccaatggagaacgcccagatcttccagtctaagacaccctcttttacatccgcccagtgaaacttctgtgcagactctgtttggccgatataacgactccggcgaagggtaacaagcgctcgctcctctttgtttagataataagctgtgtccgggtcatctgccaaggcgaaccaagtcaccacaccaagtaaaactgtcggaatcccctcgatgatcatgatccaacgccagccgcgaagtccacagatgccgtccataaacccaataccataagccagtaacccgccaaaggctcccgcaatagctgcactgctaaagaggtagcttgttcgcaaggcaatctcacgtttgctatagaagagagtgaggtaggtgataaagcccgggaaaagacctgcttctacgactccgagtaggatccgacaggcaaccaagtcaccataatcccgagtgattcctgtgagggttgcaatgataccccacaaaattgagatcgtggcaatataccgagacggccgtagtttcttgagtacgagattcgaagggacctcaaagaactgaacgtgaggattagcgtccgtgcggtgactgaattgcgtgatatacatacacagtaggtcacaaaaaggatagacaccgagacttggtactggttgccaacaagccccaagtcctcttccaggccgtacaatcgtgcatttccaatgttgactgcatattcaagtcagccaatgttcttgattccgagttggcacaagctagttgcaatcacaaagggatgagtcaggcatcccacccccacgtacctcggtctaggaaactgaagagatacaacaacaccacgataggaaggatatgcaggtcaatcttcctgatcagagttttctcgatctgttcttcatcaagagttggccctaagctgatttcatcggctgggccgaggtcaggctcagcatggcccatggtgcgaaagatcaggtagaaacaatgatagtggaatggactcggcccctgggcctaggtgtgtcccccgaggtcacttcaattatgttccaaggttaagaaaatgtcaggccgaaagcgagaaagaatcaaagttgccaagcgccaagaggtcgggtaacccttgcagccgattgataagagaaacctacggagtatgtaactgtgttatactttttcttatttcttcggattttgtttgcaagtcgcatcataatttgaaatgtagatattaaactaattaccaatgtacctgcgtagtcctggttaggtagtcctgagtatataacttcctagttcgttgactacctcgagattcgcatatgctgacgtaatatataaggcgcctgaggtctaacatggatgcatgagagcgtgatattgtcaatacaagtcaagtccgatatggcaagccctattagatctattaataggacctagagcaaccataggacatgtatctagctgtagtaaattgttgtggttgtcacgtgccgatcacatgctgatgtctggtttgtcaggcttcacctagctaaatcgctagatctcgatcgttgtagggaatgtaaccttctacatatccctcaccgctcaaggagatcttatgcgagtggctgagaagcacccggaccttccttctgggtctcttgtcctcgaagatcttccagaagtcgttgggcctgtcgagctcaccacggacaaaatcaggactgtgccgcatgatctcttcgaggagggcgtttaaagcccgttgaaggtatgattgttcattctaactgaaggccaaatttgacgacctgaaactccaagcggaacagaaaattccctcgaaggctctgggtgatttaaacctggaggaggtcgagagtatctttgagatccagccgcttcgatcggagaatgaggagctgggagatgagtgggacttacgacccattctccgagaggagttccaaaccccagctgcctttgacgaattctacgatttcctcagtaagtactgtgtccttatggtttccaagtttcactcactcatctatgaaaacagtgaaatcctttgaatacctggacgttgcctaaggaaagtccacccgaaacgaggcatatatacgctctcgtttggatatgatccttaactttgtgctcggctttataaagaaggagggaagcttactcgccagaaaggagctatcgtagggatacgagacgcacttttcctatacaatagatatagcgggagttgcaacatttctttgctaccttgctatcttactaccttgctatcttgctactatgcttggtctatggaacttataacatacctaccaaaagtgaaaccaaaatcatgatactgtagctcttatgatataatgcaaaaatccctcgtctggcagcatggggtgccgaggctttgaagtacctttgtggctgctccttataacgaggagaagacactaagttttgtatgatcatattttgagtatatcgcctatatacaattaaagacgttttggttgacatgtcctattttgaatattctaatagggttgggggatcgggtcggccgggaattacgttaacaactcggagtacctacctgtagtgtgcctcttcttagaagtatcaaagtctacatgtaccctagacagcaaaatatgaaggtcagcagatcaggatcgaccggcctagcctgcttacctaatggcaaatcccgctgtcatttttgcctatttgtggctattatttgctgcagaaagaggaactatcactttctgattccttctgcaccatattcaatttggattgatatctgccatgaacgggactttttcccccggcgattctgttccccccgcaatgcactgctgacggacacacaatctcttatgacttcacttctcactatgagaaatccttcacgtccacgcgttttacagagcttcacaatcaacttctgaatcttgctatttgaaggtttgtttttctttctccaccatagggagatctagaataacggcatcctgggtctcgaacaatcaaaatccatcaaaatcaaaaagtaccgcttcaagtggaccaatggcggacttagtcattccttcctttgggaggctagttgcatccaaaactcttgatggccatactggcttcgtttgggatgtggctctttccggcaatggtcaaatcctcgcctcaatttccaatgacatgatgatccgtctatggaacgccaacaccggtctccagcgcggcgccgcaagaaacaacggccattccacgtgggtgcgctctgtgaggttttcccccgcaggtcgattcttagccactgcttccgatgatatgaccattcgtatcagcgacgtgaacaccgggtttacctaccgcatgctgcagggtcacactggcaaagttcgagcggtggaattttcccccgacggcaaaactctcgcttcagcctcagatgatttcactgtgcgactgtggaatgcaggcttaggttcgctggtcaaaaccctcaatgggcactcgggctgggtgcgcgctgtggccttttcgcctgacggcaagactgtcgcttcaacctcggacgataatacaattcgtctctgggacacaaccaccggcaaagaaatccatcgattaaatggccatgaatcctcaaccagggccgtctgcttctctcctgatgggaagctgctagcgtcgggttcgcaggacaaggacctgcgcatctgggatacgaattctggcgccatgctcaacgtcctccggggacactctggacctctgcgcgtgatcgcattttctagcgatgggaacctggtggcatcagcggccgatgacctgacaatccgcgtatgggctgtgccattagggtttacctgcgtccgaatattaacgggctactccggatgggttcgagctattactttgtcgcgcgatgaaaacgtagtagcttacacgtctgatgacatgactatcaagatttggatttcggcgtgattttctgtcgtggaaggaagatccttctcgttgatgcgcgctttgtgttgaatttctttttatctgagatacccaccaatgttcttgattcttcagctcgcatgcaatttcttgcgattagcaatcaacttatttttaagtgatgaaaagccggaaccaaaacccgtctcctttacctcgtttgaacagttgggtcgaagtcgctagaggcaaccaagatcttccactctgctcaagaacactacatcaggttttcaagtccacaagtctacttatataaaatggcagatacgcaaacttgttgggtgcttcgcagatccctacctgttcccagtgtctgcattgatatgactcactcggaatattttccaggagtcaatgggacagcatgtgttgctactatcccaatcgcaaatgctttttggcctagtaatctgctgatttccatcgaaatttctgactcaattcgatggaatgtgcccttcaacacttatatcctgcagtacatatctttacttggactgaaaccatgggcccatcaatttcaaatgacaatcctcaccaagtctacgatgaagttcataaacgcgcaatcacggaaaatgccttccaggagaaggctgagatacaagaaactcaccagtccttgaccattgattttgaggaggacgaccccggaaacccactaaactggcccagatcaaagaaatggattatgacaactgttgtgtccctttcagtgtttctaatgccactgtcttcgtcaattgtcgcacccgagttgagcaccatcaaaggcgaactgcacatgagcagctcactagaagcagtcctggtcctctcgaccttcgtcctgacctactgtctcagccctctgatactaggcccactgagtgagatatttggaagagccacagttttgcactcgggaaattcattctatttgatcttcaacctggtgtgtgggttcgctcggaataaaggcgaactactcgcttctcgtctgctcagtggcgttggaggcgcgggtggacttgttgtgagtatgcccctcttctgcgactagattttgttctaatgcgccaaatataggtgggcgcgggtatcatcagtgactgcttttccaaagaagagcgcggctgggtcattgccatctacaatctcgggcctgtctttggaccttctctgggagctgtcattggtggatttactactcaatacacgacatggcgctggacgttctgggcgacatctatcttcgacggggctttgatcgtggttggtttgcttgttatggaggagacatatccacctgtcatcctcgcgaagagaaaggcgaagatgctgaaaacggccgtgacaaacactcctctattgaagacaccttatgagaaaccagaccagagtctcggccagttataccgcaactctcttctccgacccctgcagctcctcagagtccagcccatcgtccagatcctagccatcttctacgcctatctatacggtctaatgtacttggtactctcgaccttcacaactctttgggaagagaaataccaccagcccgtcggtccagctagtctaaactacctcgcgctgggaatcggatatttgcttggttcacagatatgcggatttcttgcggacccaatctacagagccctgaagaagaagcatggcggaaatggcaaaccagaatttagagcagttctcatgttccctgcctcgattctcgccccggtcggtctgctgtggtacggatggggagcgcaggcggtcacgcattggattgtgcctgatcttggaatcgggctgtttgcctgcgctgcgatgattctgttccaatgtaccagtgcatatctgtatgaagcttttactttgtatgcggctagtgcgacgggtgctgtttacattcttcgtggattgacggggtttggatttcctcttttcggaccgaggatgtatcagtcgttgggttatgggtggggttctactatgcttgctcttgttgctattattatgggatgtccggtgcctgttgttctctggaggtatggtgagcgacttagagctcggagtagttatgctattgggtaaagtatggatgactcaaaagcaataattcacttgactttccacgcattatggaagtaggatgacttcataaaacgggcgcaacgcatgaagctaacatcaagctatgtaacctcggttcaattctcctccgcattaccgggggtatagctttccccccagctttggacttggattctctaaccttccaactatcgattgcaacgatttgcaatgtctgataactacggcagctaccaaacggaaatctacggcaagggtgccttaatgagcatcatgcccggtgtaacaaccgaccccaacaagctagaggggcaagctcgacaatttctgggcgttcgcgcattcaattatgtcgctggcggcgcaggcgagaaagcgacgatggacagcaaccggctggcattccggcagtggaagctgtaggttcgtagatgtttattacagtattcgaacactaacggatgagatcgatagaatcccacggatgatgcgaaatgtgagttgcggcaatctacaataaactactattacgttctcgctaacgggtgacatacccagacaccggagcaagacgtctcggtcgagctcttcggtcagaaatacgataatcccattattgtagccccggtcggcgtacaaggtattttccacgaagacaaggagacaggccttgcagaagtatgcgaggaggtcggagtgccatatacgatgagcacggcaagcacgagctcgattgaagatgtagcgaccgccaacaaggacgggaagcgatggtatcagctgtactggccgaaggataatgatattacgctgtcgctgctaaagcgggcgaaggagaacgggttctcggttcttgtggttaccttggatacctggtcgctggcgtggcgaccggcggatttggataacgcctatgtgccctttatcaagggggtggggaaccaggttgggttcagcgatcctgttttccgcgcaaagttcgagaaagaaactggatcaaaggttgaagaggatatcattggtgcttcgcgcgcgtggatcggtgatattttcgctgggagtccgcattcgtgggaggatttggctttcttgcagaagaattgggatggaccgattgtgttgaagggaattcagcacgtggaggacgcgaaactagcgctgaaatatgggtgtgatggcattgtggtatcaaatcatggtggtaagtcccttgattagctttttacatgttcttcctctgaacttttgtccaggccgtcaagtggatggtgctatcgggtctctggacgttcttccagagatagtcgatgcagtcggggacaagatgacggtacttttcgactccgggattcggacaggttcggatgtgattaaggcactgtgcttaggagccaaagcagttctcgttggtcgaccggtgatttacggactgagcattcagggccgagacggggctagacaggtgctaaagggtcttttggctgatttgtggcagaacatgggcctatcgggtattcggagggtgaaagattgcgaccggagtcagattcgcaaggtgcaatacggagaggtgaaagcgatgatgtagagggaatcagacctggaacgtgtatagaaatcttggacgtcgatcacatgtgaagggcccatcctcgaatctcgattgttggggtaccaactggcttacgcctacacggacagccttgaaaggccactgtaaatgtaaaatttccatggcttgaatattctcattcttgatatgtttacaaaatccaatgaccggggaaaacctgatatcgagacgaacctcgactatgcgcacgctcacattccagcctcaggatcaactctgctcccgcgaccagtcgcgtcgttgatatctttgattacacaatcaacctcgctatcgttgcgactaggtacattctttggcggggtagccctggatggcgcgcgagctacgactttgaccagcttagaactaagccgggctttggtcgaggggatcttgacgagggcaggaagagatgtcgccattcgtagtggcgatgaacacggtaggacagaagccgagtctctcctcgagcgaagtgtatgttcctaaatcctccaaggctgtcgacttagtcttgactaacaccctcctagttggcgacgctccacacgaccgtgacctcggcatctttcttcgcggcggcgacatttcatttctcgtccaccaccttgtcttcggttgcaaatctctcgcaggcacttctgtctactctggatgccattcttgggtccaccgagtcttcgagggccattgcggccattatcacgctgattcggcgtgagtttagatccgttgagcccggcgcaagtactaccgagaatattggtgtcggagacctcctcattggctccctaggcttcgcgctattgcagcgttggggcagaaagaataccgaaagacatctccggcagaatggcggggatgaaattgtttgggatgttgtcatcctagacaacggcgcacgagcagacgtgatcggatcccatcagctgcaattccccgagcgcaataatgaagagctggtagagcctgacagtgcttcctttgtgatgcctggaaatggcgagaaagcatttgatgtaattcgacggtcgagcgtgtctgattcggttggacatcgtctctctattccgttgggtggccagcagcaagtgtccgacgaggatattcgcgcttatattatgagccaacttcctcagggctgtcacgcatctatcaagtcggaaactctgacggcgcgaactatcacagtcgatatctacgatgataatatggcagagattgccgccccgcctggaacgaaactgatagaggagagattccaccatgatcatgattatgaggataccaatacgtccgatcgtcagcgacggtgtcccaagcatacagtggtgtttaggacagccttcaacaaatcccagagcactcaactgcgatcccacgacggctctggaaattttgccctacctgagtctgatcatcataaacgagcattgccgggaagctcattgactaatagtccaatgaagtctcatcatggtccgtcacgttcccatctggataccacgcagagcattgcccccaagccgcgtgggacaactcccgccttgccgaatgaacatcccaagcctgcacttaccaaaggctcattcgcgaaatttgcacaaaaggttaagccagctgttcttgaaaaaaatgaggccaaacggccacagggaaagaagccatctatagactcatctgcgccctcgggcattccaagtcttcgtctacctcctaagcctacaaaaggaacagcgtctgtgaaggaagcgacggcgcgagaggtctctagcagacctgatctcaagaagagacaaactgaacctctgaactatcgaccgacaacccctgtcccgaaccggggtttacgaaggtcccccttcccaaactccccccaaagacaatcgtcagagtcgccaacgaaacacgccctatctcacgaaatgcacgcctctggaggctcacgagggggccattttacggtgcgagagaacagccacgagtcgctcctcactcaaaccgacacatttctttcacgccgtagtgctggtatgcgttctggatcgcctgccgcggtccagactcacgttcgcagcagcagctctatgtccataacaagatcagaagcagacgggactttatctgcgaatgataaccgccccggatcgtcagctatgcaccgcagatcccaatcatacacccccagcctgtactccctagcgactgcagggtctgagacgtcactgctgcttgcgcaccggcctcgcaaaagtgcatatgaagacatgaaaaccatacaggcactcaatcgcgatggctttgttccaggtatatttccagagagacacttcgtgcaaaacattcgccggttctcccggttctcctctgcttcatacggctcgaatgcgctcacggtcatgggtgttcctagtggctcgaagaatatacctagtaccaagtcagacagccacgagcatagtgcattctcagagaatgcaggccttccaccctctacgatcctcctatcttcattcgtcgatccagccggtggctcgaatgcagctggtgagacagagacaggcttcccattggtccactatctttctatcgaccatgactccaaagccgtggttctgactttacgaggaacatggggcttcgaggacatcctcacagacatgacctgcgattacgatgacctcgaatggcagggtaaaagctggaaggtgcataaaggcatgcacagctcagccaagcggctcctagagggtggcggtggccgagtcatgatcaccctccgtgcggcactagaagaattccaagattacggtatagttctatgcgggcactcgctcggtggaggagttgcagcccttctcgcaacgatgatttcagaacccaacccctccacaacaggcacatccttcgtaacagcctcataccaacccgctgcccgtccccgcttcttgactgccgatagtaatcccagcatcccgaaccccagcctaccaacctacaccatcccagcaaaccggccaatccatgtctatgcctatggtcccccagccgtgatgtcccccttcctccggcttgccacgcgaggcctaacaacaacaatcgtcaatggctccgacatagtccccagcctgtcgctaggcatcctgcacgacatgcacacagcgtcactgtccttcaaagacgatgccacaggcgccaaagcgcacatccgccaacgggtcagcgattctctccgccaaagcatcatacacaaattctacgtcaaccagcctccgctggtcgtcaacgcgggcgatggcgtgggtgaagacgcttgggcttggaaaacgctaaaactactccgggatgagatgcgtgcgccgaaactcatgccgcccggtgaggtttttgtcgttgagacgatgcgagttctgcagcgggatgcgtttacggcgccggagctcggcgtcgatgggtatccgcgtcttgggaggcctgcgactcgcgtgcagattcggtttattcgagatgttgatgcttggtttggtgagttgcgctttgctggtggcatgttgagtgatcataatcctgctcggtatgagactagtcttgctgcgttggtgaggggagttttggatgagtagagcttgaggattctagtatccatgggtttttatgttctattctcatttgggttgatggaaagttggatgttggtcagatatattctcctctttctttggttatttgggattataaggttatgttggtaatgatttgatgatatatagggcatagatagacaagaatgaccatttataagttaacaattaacaattaccttggaattgtgaggctcagccattcttcctgatttgagtagtagccgtcttaccatcccaccattatcatacctagaaaggtatgggggcggtaagacgcagttgatggaccatcgatttatggttaacaaagaacaatgctgtaggcactatgaaagcagctacaggagagaatataagagagaaaatagggaaagaaaagtagttttgatcatagaatatacattgagaatcgtaagtttatagtgtatagaaccgacccatctaaaccaaatgggaatccgataaatagaatcaagaccaagatccagggtatcacggcatcactcgcaacgccaaacaaaagaaatccccacctaacaaaagaaaaaacaccctccaaaaaaagtaaacatgacaaagaatcagaagaatacagagagcaaatccacaaccacttatacaacaagcgcagtaggggcaggaggagggcccgggcgaccagagtggcagccacgctcgtggcgcttcatattgctgcggacagagaaagccttaccgcagccggcgtgtgtgcagcggaagggcttctcgccagtgtgagagtgggagtgaatgcgcagggaagaagggcgcgagaaagccttgtggcaggtacggcagatataccggtcgtggttctgctggtacggggctgaggtggagggcgggaagtagtggtggtgttgccaagccggggtgacgggggagatgagagccgaagacgagtgcgagtgcgagtgctgcgtctggacagtgggcatctggggggctgatactggcgtcgagggctggaaagaggatgtggttggcgggcgggggtagtacattggctgttgaggagcgtcgattggagatgtgtacgatgaaacgcttggcgctggcgaggcgtaaggtgctgtgttgcgcgggatgtggattgagccgttgctagagatagaggaacggtgtaggtgatggtggtacgcttccttgtgagagagcgactctataggagatgcgcgacggtgagcgtgaccagagccggggcgcagaggcggtgttgggggcagctcatatgactggacccggacgtgacggtcaccaagagatggtgagagacgctggcgctctggaaggtatattgattagcgaatgtgctttgaaattgtagtatcgttgaaagtactcactagctgcgtgctgggcaccatcagcaccctcaaagagagatgagattgaaggcaatgagaccttacgctcttcggccggtggcgacattggcggcgagcgcttatagtagctagactcgagaggagtatagatcggcttgacggccgtgctgtgggagaggaggttggcgagatccatgatgaagaagacttgtttgagaagtttgatccggctgcgtttcaaggttggctttattcagtgagtgggggatgccacgaggtttataccagaaagcaggcggacggcttaagatgatcgccagcggacgatgccgactcaggcaaaattccgatttacgttacggcatttttaaattctttttaattctgggattttcataattgtatttccctttattaattctttttcgatgtggtctgctccaaagcttaatttaattgattttatttcttcattatggagtaagtttaataaaaggcatttaaaattcatttaagcgagataaacaattaaaaataattcttttcggagattaacgtgggggggaatgacgatccacccacgcgaaggcagaacccctaaccttccagccttgtgggatgtgcagcgccctaaacccaaattgggaggccgtaaagaccccgttggaggattgcacctcggcttcggttagtgcagatcctgctcgacctgtcacacatcccaagccaccccataaacggctgatcgatcagggatctgttgatctgcgagagcgatgaacggttgtatacagagtagacattgataatagccattctcggtgttttgatctttgaactgggataataaatcataagataggtgccaaacccggggatgacacggttcaggagatcattttctcgcgtggctatggagaaaaacggcgcgagcgaaaagggaaggtcacagagggatagcactagtccattttgggccacatctccggaaccttggaatcatagttacgcctgcgctgcttatacgctggtcaggctactccatacatgatatccatggattgactatgcccggcgtaccggtacggagtactgtagatttaatttaatatattaattaccatctcagctgtgtgatcaccaagggcggctctaagcgctgggggcgagagagaggaatgcctgaaacagttgcacaatccatggccctgggctcgcttacacaaaccttacaggcacagtgagcggagtacatacattgaagtatgtatgtatatgagaaaacttgtttccttcccactctggtgcatgatacatagttagttatagttacaataacccatttagtaattcactctctagtcttggtccaataatggatatatggttggagaatcgaaaatggaaagatcacatcagcaattgaagacctcatacgggaatactccgcctagagtcgaccatgctcctgaagatcattcctcgaagccatggaactgaatcatggctaccagcgaaaacgagttattgacacgatcggcgttctggaacattactcctattaccatgttacctgtgatcatttctagccgtgcacggtttctgcataggagcgattgaggattggccgttagggggtggattcgtcccggcctcgtggaagcgacctccactatttagccttttacagagagcgagatcgccggtgaccgaggtacataataaatatccattacaatacagactgtacaaaataaagcagggaatatagattatacatacgtgtatccattcttattcatcctttccgtctacattccgtatctcacttggcaatccacttaggcaatagcatgcttatatgtgtatctatttattgatcatgtactattctagaatggctcgagcgttaggatcgtcccgggcctacggatgatcaacccccttgtcggcacttggtacggatcgcctattctcaaatgagcctggcgccggtctttgtattccgcgggcattgattgggtcacccttggttcggctcagggtaaatggatatttgacctttcctattcagctgtcaaaaagtcatgtaaatcatagttgggagcgtgccatatatcaatatagggaatacacttctagagctcctcctgagaaacttgacgcgccgacggctttttttgcttttggtgctttttctttttggtcatgaaaccgggaaaagtgtgatccgctcaagtcccatgggagcgattttacgctttgcgcttacgtttggttttgttgattgggttatttttccccctcttctaatgcctctactccgtggggagtactatatcctactatatttatcacgactccgtgcacattctatttttccaacaatcgatagtctggtcaatctcaccgaaagatatcatgttgagggtgatcgagctatcctctttaggtcatagacccgggtaggtagcggattcagccgtgatcgctgatcgtttcttgatcccggggcactgggcccatgccacgcgactgtctcacccctttctttcgggacacacaggcttgtccgggtcgagttaatggtcgcaaatcagtggggctgaacatgtccacgcgaggaacttggatctttgcagatgtgatatcttgtattcatgctcttcacgagttatacgttcaatttgtccactacaaggtactggttgccttgcgaaagggttgacacatggcacttgcatatccatgcgccttttatgtctgctgtatcacatatcacatcgtgtagtgtttcatcgagggaaatccaaaactataattaagattaaatccctccaagcgtcaaccttgacggagttctcaaagtttaagaaagtggtctcaatcttctttcgaacgtatgttctaaaattgtcgtgaattaccccaaatccccttggatgccgaggtcactagaaattctaaactgccaagcctgctacacgccgatctgggattggtagatccgatctcacgcttgtactacttgggaaggtgcctctattggacggtggacgcgccttggcaatgcaagtgccacgcatacaataccttttttttctttttcttctttcctccatttctccatttcacgtggcaacaagccctaatctggcattcagtccgatgcacctgtctgcgtccgatcactaggatatccgcatgggatcttcccgcgacgaagactgcagtagtgcacggagtacatattatatgctatttatgcaggtattggattattgaatcataatccgaacgtgtcgaacgacacacttttcacctttatattcatttccaactggataatatcaatctgcaatcattgcatatatacagcatagaaatatactttgtactactccgtatatagtaagtatatcaacaacataactactccgtaggtagaatacaatatacaatcctgccaactagtatggaataacctccttcctattccgaaacgatcggtggatcaacgaagatcccaactctagggggatacataaccgatggtcatagctcccgctgactcatttcatgatcgcccgccatctctaagcgacgaccgtttagggagtgtctccgatgcggtcctctacgtaataatatgtcgatacatattgttatgcggtgactcgtatttggctcctcagtgctcatgcaacgtactgtggtactaagcacggagtacggagtagatttagattagatacgtacctgatctgatgatgtctgggtcaattcgccatgaactggatttccacgctacggagtaatattttcgatggatgacaccttcgtccgatacctcgacggtgtttgttcatttttcagccccccaaaaaagggaacagcctttctacaccgtagattgtcataagcgtatgaccagccgcacccgaacccgaacactgaaaatcagggggaagaagtaataatagaatgtcaatgctaaaaagcaaaaacgaagaccctgagttacctataatcggatgccaaacgagggatgatcgacagcgatcacctataatatacggagtacatattgaccgtctcaaaagaggcagatccagcgaaagggggcgtgtcgcttccacagagtcgggcctgtgaaaaacaccgaataagaaagcagggctacggtacaatcctaccgaaatctgctagtcccagctaggtggacggagtgtagccggaacgagtgttaggcgagggacggttagaacccggtatgtctgaactgtatgaaacaacgacctgttcgtcgtggccgatcataaaaatctagcgagattaccggcgtcttaccggggtaccatttcccgcctcggtacaatccccgtgtaggatcggccgtggggccatcgggctacactcctcatgttgtctaggcgaactgaccatgtcgtaggttccataattttgcctccaaaaaaaaccccccgagaacatggaggtgatacccgacctatcgtcatagttgtagatcctacggagttgtgctcctgtttatttcccctttcgcgcccgttctcagcgcatcggtagatcgggaccactttgaccccctccgtgtctctgctacggtcctatatagttactagtatgtatctggatatctgcgatctgcactccgttcgctccactggagctatgaaacacctgatcaacttccctgcgctagacccatcagccatatccgaatgaagccatacacccgcgcatagtcttcggaattgtctgatagttcttgatagtcgcttttatgaacgacatatctattgcttcggtacggagtattcacctatattgtactgagtacggagtactccgtacaacatacatcgatggacggagtgcatactccatggcctgcaaaagaataaagttcatctttgattactttgattaaggtcctgcctatttcggcatccaacttccaagtcttccttttatttagctttctgtttttccactctgatccgtcgggtttggtttcgggtctttgttcggaaggattcattgtcgcaaccgttgagatcagattccaacccggtgactcaagattatgtgattactcgggatccactcgccgaggattgcttacacattaccaaccacacaccgagcacactacgtatgcaagtacggagtatgcaagcaactaattcggacatactccgtaatccataacagcggggaggagtggacacgagtctgatcatgcccagccttccgtattccaggcacacgacgatagtgacatatacatacgagaccaatgcccgttgtattgatcgcttactgggatgcaatgccactgtaatgccattgaaacaagaattcagcgcctacattacctttgcatggtgcatacttgtaactaactagtcatatagagtttgttactatttggtcgcatagaaggcaatcccctaataatcctctgtcggagaggcaatttcagtgtgaaccttgtacaacatagaacgtacgttgcacgttgtaatggtgtgcacgctaatggtagatcctgggtgatcgaccgtgtgattttcacggtcctgttgtttcatgtcggcaattgcttcttcatgtgcggggattgggtaggaaaggcgtatgcgttgagctcattattatgaaagcattaccccgtacgccattggattggtagagatgtctttcggttactataatggtactccgtagattatactaccgttgcattctaggcttttacttcgggggggtgggcgcctgggacctgctggcttatagatccttgtacctactagttcacctcgccacaccgtggtccgttgggtccacatatgcatttaggtggcatgtattattggataaaggatggcttgggtcccgtcttcttggtattggttatcctgcgccgcattacaggcggatcggagtcctgctcaagtaggacaagtacgagtggaaagggtttgcttcgtacatcctctattattatatgtagtcacaaggtacaaggtacatgctctcaataataagtgcaggctgcataagcagtctgcaatgatatacaaccattcaagtcaccaggccgcccagatctgaatatgccgggtgtggccgagattgtgtgacgcttgaacactggctctcgtgacatattacattgacaatatatgggctattcaactaggttgcggtgtttctttgtcttcgaccccaacggagtactccggtactccgtggtgagacctcaagccacgttattgggggccgttgaaaaggatcaagcagcagagtgaccaatgcgctgatctgagtctgcggaccgtgcatggctcccagcgctatgatgcatcacttggcttagtattgaaacatgacgtatcgtctttgtaggtaagaagaagagaagtgacttcactacggagtagataggggtttccaaccttcaagttggaatagaaataagaggttcgttttgcgaggtggggaaatgtccgcaagtgatcccaactaggtaaagagaaagagaggatataatacacatacaaatatcaagagcgtctttacaatgcatcgtagaatatcgagccaacggaccaaaaagcagcgtcgatcagccccgtgcggtatatgcatggccatctcgataggggatgggctagagatgagacaagaagagtacagttgaaatcaaaggagacaaagagcaaattagagttgatcttagcgaaaaggatgttaatgccgacaggtcattggtgtgcaatcctccggtgatcgaccgaaatgtcgatctgagctctcttctttactgcaagcgatctatttctctttcggtcgaatggtccgatccgagcatgagaatgcttttcgaactttctaggccaaggaagaaccaagagaaaatcgtaaacggttgtatttgacccctttggccttggagcaagttcgtcctttactgcggctcccttttggccccgtatgcatgatcggccactccgtgtctgtgcgagtgcttggtccacgtctgtttccaggatctttagtctgatcgtcatatcttctgacatttcgtcgagcacaatatgctgatagagtataaaaccattgctcgtggttacatcgaaaatatgctccttgttcttagaaattagaaatctacatactctggacaatagagcccttccgaggttcgaccgacagattggctaaatggggtaataggataaattggtaaattggtaaattgggtatcgcaaactgagcataaactaaaaacctcaagaacttcgttaggcatagacgtccacttgaccattgctttgcatgggttcagatgggccactggtgatcgctctggcggccaccttcctcatgttctcaattgccttcttgaagttggccttgtcataatcttcgggcatatgctctccactatagatgcaaagcacgcgcatacccggcttgtaagagagttgttcaagcagcttaggtgtaatgaggaagtactggccgcccccgccaccgccgatggggttgccgccttcgtcggtttcttcggtttcgtccgaggcacaggcaatgtccaccaggcgtccgtgaaccatgcgctcgtttcgcgggtccataccttgattgatctcatccacaacgcggaatggcgaggcggagagcgactgcagtgccatgagatagaagatggtactcaccgctcgttcaccaccggactggcgatgtgaatccaagactgacagccccgcgccctgacggaactggacgtgaatcacgatcgaccactccccgaattcgctagcaccaggctcgccattgggcccagcttcaccttccgctttgcccaaggtgacctggccagcacatccaatgcggcggaaagaatccgagaaggcatcgctaatcttctcgatgagcgcttccaacctaggctcccagtccttgcggatgtccgtgatggcgttgtcaatttccgtaagcttgttcatgaaatcggcgagtttggagcgcaacttctcaatggattttccacggtcttcgaattctttgatcatctggctactaccaccatgggtgagttctagtcgggccttctcagagtcaatgtcggcttcgagcttatctatgtcatgatcgttgagttcttcaagtagagattgcgcgtcgggttggtcgtgcagttctcggctgatttgctgagctttttggaaaactgctctggccttcactttggattcccttaatttgactgtagcctcctgcgcctgtcgtctctttgtttctagtaacttcgtactatcaatgttgcgatgccgcagggtctgaaggtcggaagttgcctccaggaataggacctcgactttcatgagctcctcatgagcttgacggaacaattcgacagcatcctgcattccgtcagatacggtagatagaaatgtcagtgatgaacttacggcatattcgacagcgacctcggccttttgaattgccaattcgtcttgctggttgcgaaattcacgaactctctcccgtaccccatcaaacatggctgtaatgttttggagtttggcctcttgttgagctgcaagcagttagacaaatcccagacggcagaagaacaagaaacgaaacatacatattttctctgggattgctcggtactgagtgtgagccgtctgttttgcgctcttttctttctcgatgtctgtctgtagtacgattagtatatcgtgtgacgaaaacaagaggactatgcggaataccatttctcgctcggtctgctcgtgttcttcgcttatttttttcacggcagccctttcggactcgagcttctccttgatgtcctgcagctgttcattccataacgtgatgttctcttggtgttcacgtttaagggaaacatcaacaggctgttcggtccacacctgagcaggcttgatctctcgaacccgagttgatgtggcaccaggtccatactctctacgccgagtcacttgatagctttttttcccagatacccaggagctcattgaaccctcctccaagcgggcaaaaacttcatttgaaatttcacgcagtccgataggagtcaagtgtaggctcttctcactgcacagcatggcaatgacaggatcgggcccgaccagaaaatcccttgcccaaccatcgaatcccaattgggcaagttgatcattcgtcattggaggcctcatagtatccaacgacagcgagcaggtgcggatgctaatgtcatggagtcccaatgtttggttaatcgcaaattgcaaggtgcgaaaatcattcctggtctgtacggtgaacgacgtgaagtctgtcttctggaataaagactcgacagcatcggcaaatttggggtcggtgattgagcacgtaacgattggagggccgaagacttctttttcaaacttgctttggttttcaagaagccatctataggctttcaacgtatcgttggaagatttctgcaacttgagttcttgttggccggaggctgaatccaagctgcttagctggagttcggcctgcttgatactcctttgcacttgctgttgctgctcctggagtggctgtctcctatcttggatttctctggcctttgcctcaagctcgcgtttttcgcgccgtttctctctctaatgttgtgataagtatgctggtccaaatcggaagacatagggttcttaccaaggtctcgttgtagaattccgggtcgaactccacggcctcctcttcttgttggcgtcgaagtctatggatagcttgctgagcagatgctgcttcggacttgtgcctctgaccactctttttttcggcctcaatccgacctttgagatccttcatcctattctcaaattcatcgattttttggccgcgttgagtggcgaccctagatgcctcgtcaacagaatcctttcgatcatctttcacaacgttcaatcgtgcgatataggcctctttggcgttgactgcacgcaagataggctcgttttctgcctgaatccgatgatattcacgctcagctacagctttggtaaccttcagggcctcgacagcattgtggtgttccttgtactcgacaattggacggcaacgctcaaggatttcgattttccgcttgatcacagctctctgacgcattctttcaacgtcggctctctgcatctcttggcgattctccatattttctagcaattccttgtcaccactgttgtccatctcgagtttcttctgctcagctctcagtctcttcaaggcatcatgccattgggtcatttccggaccagctgctgctcgttgcgtggaatgaagaagctcaatcggtgtaagtgcagcaaactcggcgactttatcctgaggaagaaactggcagagattgtctacctggatggcgaaggactgagccagtttcaacacatcgttcttggaagcgggtgctccgttgagtgtaaatgagcttttattgccatcgcgcttgatgagtcgctggatgacagggttgtgaccaatcttgggcggtccgcatagttcaatctcaatcgtagcctctcgggccccatgcttcacaaactcgcctagttccttggcgcgtccaaggtgctaaagatcaggtgagtatcagtatagggaggctgtgcagtattatagtccgggtcttacctgaggtccccaccccaggcctaagcagatggcacagaccagggtgcttttgcccgttccatttggaccaatgaccatgttgagctttggtccaggataaaacactgctgatgtataagtcacaaagtttgtcaccttaatccgcacgatcgcgcccggcttataaccaccgggaccaagaccatcgtgggctgtcgcacgcgggacctgagaaactgcttccggtatttcagatccagcactatccccatccctctctcgttccccttcgccttcgctctcgtctccagagtctgatccgctatcgctttcagcaaggtccaagcggggacgtttgttgttcgagggttgggcttggggagtaaacgtaaagtcttcgtcttcttcatcctcactgtgaggtcgacgacgaggaatactgggtgatgccatgcttgttggaaccctcaaatagatgtagagggagcctcatgggctgtctgtgaaattcgctttgtctggctgttctttgttcaagtccgacgcgaggaacgcgtccgcgatcaataaagtccgattagtaggcggtgagagcctcgaaatggccaattggttgcagccaaaacagcttcgactttgtatagcactcaccatgcctcctccgaatatcaagcggttgatcttaactactgcagttgtttctatcactatcacgggtactctttatggcgctcgtctcaaaactgatcaagaaattgctgaggtatgagcgaatccgcctagatcgaatttatccatttacctgcagcatttcagatctaacaatgatgcgacatagacagtaaagcaacgacaacaatcgacgtttgatgagcaaaccaaagctctccaggatatgcgctccaacctgattgctcggagaggcataattgagaaccagatacgagacctggatgcaaggatgctagagaagcagcagaaaggcatcagtggtgatgctcaagatcaaccgagtggaggtcgatgagcctatgaagtaattgcccaacggaggcaacggattcacaactaccgttcaacgcgaaccaacccacgatgcaaccggcatgctttgagtctccgaaggaccgggcaccacttgcgattcaaatacaaggtggcggctatcgactacatagttccaacataggtcttaacacccactagctgcgcagcaaactttctactaggcctgttgcacttgtttttgatcttcgagtcccacaatccaaccatggcctgcaaagtctggaaacattggacttgcttcgattgatggatttgactgcttgtacataacttggggtgctattcaaatcaactattacttcttttgtttataaacaagaatatatattttttcctctggcccgaagtgctaaagattctactagagggctggatgtatatttagcatctttcatttcccagacactgtagctttaatctctaatccagagcccctggatatgtaaaccggcctggaagccacttgaatagtgcgatgaaatcaggagacgccgttggtcgactaatttggaagctagtggcgagaccccagacgcctaagcctcgaggttcagtctttccagcaaatcatccagcttttcgagcaagatctcatagttcatcgcatcttccgagaattcatcctcaacaaccgcgccgtcgagagttcgaatctccggggcatggacttgtagctgctggccttgattggggatagcctccttggaaacattcagggtctgtacaccttctgtaagatctaaaatatcttccagcggctcgtcttcgtctagatcttccggtacttctttttcttccatcatctcattcagaccagcctcaccaaatctcaatctaaaccgctctccaagatagaaccggatatcatccagcatttcaatggaatcggtttcctgtctcgccttgatacgagatgctgattcctggatcaactccgcaaattctggcctatctatatgggcttccagtcgatatgcgagatatcgagcagcgaactcttccaatctctgcacgcgcgtcaaccacgccgctcgaacgattaagtaaatgtcaatgtcatcttcttccgcgcctcctcgagttttcgcagcctccgcctgggacatcccagcactaccgagggtgctgatgaccatggcggctttcgtcttcagcttctcaatgaagagcatgtctgcggcgaataggacgtcgacagcgatttctaaggggaaatcggctctttcggtgtataggaatgtaagaataatttccaagacttcaggcgaacagttgacgtcgatgatcgtcagatgctcattgaggtaagcttcgcgaaaagtggatgtaaacattgcctggaaaaactcagaccgcaaaagcattgctcgatggcatgggaagatgatcgatttcggcgcctcgaggttgttctcattcgcggtagagatagcgccaatagcaatcgaactggatgtgccatttctgacctctgatgtgtcaatgtcctcttcctcctcatcatcggggagttcatccgctctcagaagaacatcagcgaagattgcattgcttcgatcccacttcacttcatccaccttcgaagtctccacctcgagcttgttccccagaatattctcctggaaccattgttccatttgatctcggcccttggaaatatcgtcggttcttctttgtctagcacgtcttctgtctccactatcaaggatactgtctagaagactaggtatctccaaatacttggaaattctatccagcgctgcaaaagtctcggactccatgaagcctgtccctggtccacttcgcaagtcccgaggagcttctccaaagtacagatatttgatagccgcaccgaatgcctccggtgaaatggtgctggggagattccatgttgcagattctggtgccacggccagtttaccatggaagtatggagagcgtgccgcgaggatgaatttgtggaggtggagcgattcgtcggatgccgtcacaacaatatctgttgttaatggagattcacgggtaagaagtgtagttatatgcgcggctagcggctggagggggtccgtggacttggaataatcatattccagaaggagatttcgtatccggtcgtttaaagcattatagagacatctatagaaccaccattgttaattctagccacttcatagagaatcaattgctatttacctctcaccctgaaatgtgtctcgctcacaaagtgcaccagactcgagaagaagttgcgcaacctcataatgaccacagagactcgcctaccaggttcattgattattatgcgatacacgggattggcacggtcaaattatcaatatattgtactcaccagaatcaatggcgtataatcatagggatcacgagcattaacattgacgccctcggtgattttctcctggcagactttcagatcgccctgacggcatgcgctgcatagttcacagaatggcgcactgagatctaaagggttatcatccttaatagtgccctccttaatcaattccttctcattgactaagctgatctctagctggtccttccgcagcacagttggctcatccatcatgcagattgccaggaacaacaggtcgaagtgggatgaggccgagggcaaactgcaacggcgggggcggaaactggcttatcgataagaatcacgtgattgtacaactgtgaagtctgagattaagggggtgtcctatattgtagagatatttggaagagtaagtagtgactagaatggttaaagtatgaatcaatgtatatacatagatatagatattcaagtatacatcacaacaagaactgtaataatcataattggttaaacaccattcgcctccttccgaccgtttgatcgacctcccctaccgcctgctgggttggggaaagcgccataatcaccgttgcatagcaacgatcccccaaacacccgtcttcaaagctccaattcatattgccttgactcttcctcaaatcttcaactctacagctagacttttttttactaacacaggatcttgttttataccgttcatgcatcattgaccctcattcttctgtttcgccttcacctcaacgtcctaaaccaactctacagcaatctatagccatggcgattgctttggctgaggccgataagtatgagatattggacaaaattggtaagttctacctttttgtgacctaatttgtatcctacgtgctcaaaactaatctcatattcattcaggttgcggttccttcggaatcattcgcaaagtcaagcggaagtcagatggatttgtaagtgtgcatagttggcgtgttgcaaccagaactaacctcaaattgctcctatagattctttgccgcaaggaaatcaactacatcaaaatgtctcagaaagaacgcgaacaactcactgccgagttcaacattttgagttcccttcgtcacccaaacatcgtcgcatactaccaccgggaacatctcaaggccagccaggatctgtacctttacatggaatattgtggtggcggagatctaggcatggtcatcaagaacttgaagaaggccaacaaatacgccgaagaggagtttgtctggcgcattctctcccagcttgtcactgctttattccggtgtcactacggatctgatcccgccgaggtcggatcaaatattctgggcccggctcccaagccatctggactcaagggaaaacaggggcaagtcactattttacatcgcgacctgaagccggagaacatcttcctcggtagcgacaacaccgtcaagcttggagatttcggcttgtccaaacaaatgcaatcccacgacttcgcatcgacttatgttggcacacctttctacatgtcaccggaaatctgcgcagctgaaaaatacaccctgcgctccgacatttgggcggtcggctgcatcatgtacgagctgtgccagaaggaaccccctttcaacgctcgtacccacatccaactagttcaaaaaattcgcgagggaaagttcgcccccttgcctgattactattccccagagctcaagaacgttattggaagctgtctgcgggtcaatcccgatcaccgccctgacacatctgctctgattcaccttcctatcattcgcttgatgcgcaaggagaaagaggttgttgacctcggaaagaccctgcgccgacgtgaggaggttgctgtccataaagtccgtgaaatggaacagaacctcgccaagagagaatcagaaaagcaacacatcaaggctgaaatcgaaaatacggttcgacgagagtgggaggtcaaagcacgcttagaaatcgatcgccaggtgcaaagcgaacttgacagactccgcaagcgatttgagtctgaagtgcaagaaagggtcgccattgaggttaagaagtacaagcacaacacctccaatagcaatacctcccgggacgatgtgtttcgcacgagtaccaatggctctgggtcctctcgatccagcaatcaaggttggcggtcttctcggtcttctgccaacacgacagacgacagcgatactaccccctcatcaaacgccgacatcagccagctatctcttggctctcctccatcaaatacccgaaagcagcccaagaaggagacgcgaacacctttttgtcggtccaagaccgttgttgattcaccggtggatgttcaaatggccgagccgtcacctatttcaatcgcttcgctttccctatcccctcgccgcacttccgcccaaggaggcgctcgcaacatctttgcagaggccgagcggaccaaggctaagtgggagcccaccctagcctattctgatgatgatgacgacacccccgacttgccctcaccaactcggcctaaggtgaagcccgacccattgaaggcgccacgacgacctctacttcgccagaacaccgcggctctcatgcagaaacttagcacgcaaccttctctcttcccttccggcggtacccgtcttcctcaatcgacgagtgcatctgcttcccagtctgaggagcgcagtgtaagtgagagcagggctaggtctccccaccgccgtctaactaaaatcccatcatctgccaacctcgctgccgatgcgggtacctcaccaacccgcaagagtgcatcgaagcagcaacctccttctactaagaacgggggtggtggcgaagagatgttcaaggctgttatgcaacgcaacatgggtggccgtaccctcgtcgaactcgcacaggcgagagctggaggccgtccgatggatgaagtcaagcgttgtgccagtgactcgcgcgctggcggccccaccatgagcgtgaaatgctctgaacgtgatgctcctgctatctggaaccctgaactggatgagatgcccagtcccttccttgcccgtggcaggaaagttatccgcaacctgcggtagtcttttacttacattaaatctcctttacatttacactgttctttcggtttggttctggtttcggctctcttatgacgccttggggtattggagttttttttggattgaaggtttttctttcttggatttggatttcgatggtttggtttctttgctttggtttctttggtttctttggaagcccctttttgcccaccgttttcggttttcgcacttcgcttcttgcgcatactttcccattatgtcacggagttggcactaatgttttcggagcatccttgccatgcaaggcacggagtttgatacatatgcccatgtctctttgcattcgttggctacacacttgcctccccgactcgactctttaccacttttcttttgttgtttatgccgtcatgcccctttccttcaaaaaaggagacgattgagttctcttgtacatttattgcgttagccatgcatcgactgtcgaatttctgtacttgtttcctgtttctctgaacgtctcatctattactcgtggtgtcctcctccttcgcacacatgttgcttagtggttatattggactaatatttgctatgcctcccactcgggagtacttcacctaattcttcttcggaaagattacatattccgggttctggtgctttcgatgcttcaatgggggatgtacatatccatttcagaagaagtaaacatgtttcgtgtcattccagacttataacagccccgcagaagtttatgctgacttcctaaatgtgggagtcgagtcatccatctacagcgttagccctaccctaatatgcatcaccagtacactttaccactctttcaaactactagatgcatagaataggtaaatctgcacatctgattgaaatctgcaacataatacgtgaatgatgttcaatgaaacattttgaccaaaagatcagattaagcccacgcctcctcatcttcgatctcttctatctgaacagacttactctcctggttaagacgccgctcctcttcttctaacgccaacatccaatcctcctgtggtgaatcgccagcttgtgcttccggaacggggccggcatgatacccagccttctcaagcttgtccaactcttcaggttctaacaacttcccctgtcccttgattgactgctgtttcattctgaccgcagccggaacaaacttcctagttgcctcttgtcgcaggtcccgaatctgaggcttcgcttcgtaaacggtccttgctgctggaaccgccgttggacgagatggcagtgggtgaggaccactacgctcaacgttctgttctgaaggcacatttccatcccatctgcgctggtgctggcgtgggattggtggcggtgtatcccgcggcatgggtatccttcgcacgtcctcatccgtatcgctggtgtcactatcacgaggcattcgtgtttcatttgagcctcgccttctcttcccaagcacgccgtcaccaccaccccgtctagaactatcaccctggcggcctcctctgccgccgtgatcgaactggggtgccttgtcgccaagagcttcgcgcgccttcaaaacgccccgcaaatccttttctagcgcttcgagaagctccttatcgcgcggccgtagtttttgccctgattcctcggcttctttgaagctgttgatctgacgttgaattcgatctgggttgcggcgcgcaagtttctcgtttcggcgggctagtgcctctgatttgcctttcttcaactctttttgtttatcctgtttccgttgcgctgcggcagggttgatcgagcgctctttgtctttggccatgacgtcgtgttggtgttggtgtgtgagtggtctgtaattatcggtatggcgtaagctagctgcgcaagcgggtaataaatgccacggactcttggcgaatcaattgaagagatcgcagattaggtaccggcacaaacgtctgggctctgtggggtgtcgcacgtgaagggtatagttggaaacaagaatgcagggcgcagactagaaaagaaagcgcgcaatgaggatggccagtgtgtctatcccgcagaataacaggcgatcagtgcgttaggtcgcctcgtctagatcgatcgcgtcgggccgtcaggtcgatagtccgagactacaggtgggtgatgctcacaggccgaatgtaagaaaggctacgaacaagcggtgtgtcaaataaaatcaccagttttagcttcacggtttgagcagctaaggttggctgtgatagtagcggctgagtaaagaagttaaagttgaagttgggacttggtcaagtaccagtcctagataattttggcagaaatccaacatgcacagcggaaaagaaagcggtgtattttaggaccaatcatggaagttaaatctcatctggtcgctgtggttctccgtagagaaactaaagagtggagagagagagctaccatggttcagcattattgaactacgactacatacattgtacatacatcgtacattttacatctatgttgatttatatataatcaatgttatcattgcatatatagagatgtatatcattgcccattgctctcgattctcttatattcctggtgggcattaatgtacggagtagagcctcttgaaacttccatctcaatgagataggtgcagagcctatgcaatattcaatatcaaagaaaaaaaaaacatcgaagaagtacttgaggatgaaacaaaagaaaactctgaaaatatcaatacaataaatacataggctgctaaaaattactttttcttgatgttcgttccatctccaagcccctctttatggggaagtccgaggtatcatatttccgcctgagcctgtgctccaaaacatgcatatgtataaaagagaaatctcactagtctcttcgtcgggagtgtaactggcttccctcgagccgcgcgctgtctgttgagttgccgccaaccttccagcggctcacaccttctttctccgcctctctttttcctttttgatttctcctcataggagaaaaaagaagcttctctcccctcctcagccgtcaatagtcgcattccccggcctgactgcagtatatcgcaaactctcctctttacactctccatcctccatcatgacctgtggtccgtttggtctcacatcgagtttgatcggcgcctcgtagactgtcgcggtcggagcatgtctctgccgggaccaaatgtccgtctcagcctcgattcccgacacttcgcttggtctcacctcctccgagatccagatcctccgacaacagcagcagattgccttgcagggcggccatgccggcaatggggtggccaggggaagaggcactggaaggaccagcaattccagctcgcgcgcaaccagcgctgccagcagccagggtcgcttgctgctagaccctatgagcctccgcgcactatcgcaccagctggatggattgcaggcgcagatcagtcaccggatcgaatatgtatgtttcctcctcggtccttgaccgcatgtccatatcatcgggaaatcacatttcgttgttttaacataggacatccttgctagctcgaggatcaaatgcagcgctccatccaaaacacctacgaccgcgcgggaaacgtcattcgaaatgccgatgcggaaattgcccgcacccgtgaaatcttggcctctatcgacgagttagacaatgagctagcgaagatcgcccatatccgtgatattgtcaagtcattccgtggccggatcgagaatctagatcaccgcattgatcagagttctcggcgccgacgataatgccttcccataaacactctctccaaatacttccttcaaccccacctatcttgaagcgctccgaaagaccatgtacggtcctgcgctccgcacaactcacttttactcgaccactggatggtccgaccgatacacacctatattttcttcacacaagtatccgaaccagaacacatcaaagccgacagaacaagaaacaacagactatatatcgaatgtgtcctcatgaaccctttttttaatgcgcgtcaatcaccgtattcatatatatgtcacatttcattactctgggtatctgcttgatgaaacaattggctgaaagaactgcatgcctatgttgtagagacaccagtgttgagcaggcgacctcgaacggactgcagtatcttcatgactgcttgagctgcgtcgatgacggccatgagaactcggttcccacccggtgggaatccatgagatctgatgactatcatgaagggttttgaatgtgatttaaagcgcataagcacaacttgtcttatgcgtctccttgtttgatttgatgcttctgctatttcccctgttgcttcgattcccctctctgcatgttgcgtgtacattgctccgggttttctttttctgcgttgaggttggcccatgtccattgctaggatgattatagcttggcttgtggtgttctgcaatataattgggaacagtttcttcaaaacgattgaatcgtacgtcgctctgcgttgagtcctccaaggttgacatggacattgaaatgtcagggtctcgatttgaatagcaagcaggtcgtcggtgcagtcgctagagatatattgaggctactcaagggggttgagacttcttccggcgatgatggtggaaatcattgccctggtttgatggacatccctggcgatcgtagctgagatctcattgtaaaagccgacacaaagcaagttcgatgggctcctgcagagcgccttgatcatgtagttgatatagcaaaagggagcgcgctggcctgctgacacgcacaccttgaaagtgtggccgcattggtttcgggttttgtaggacagggtgtaagattcaatacattaaagtggcccacgcgttgaccccccacgcgtagtcactggatttggcgagtgctattcacgttattcagacaccgcagcatccaacattggcacattctgttcacataattcgactgctgctccttgcgacgacgcggaggtatctactttttgtgaattcacatcgcgtagcaaggccgagtccttctcctggcggcgttcaacgagctttttcccacgtttctccgtctgagggaatcgtttttctgtcccgcacaagaggcaccggacgaccagtacatcggcccatggcttcttgccgccacgacttgcgtttctgatttcatgcgagcaagtcacctccggcgtcaatattgtatcacagcgcttgcaaaccgatctcttcagtgtgaccggcaaccgaatctgcgtcttcattgccacggcgcgtagatgtgatacacatacccttgagaggtttcccaatagctcttgttgttgagtatctaatgtgtggccattatcccctgagtcaacatgaccagcaacagaggtgtgttcattgttgtggactttgacgttctgacccttggcgagtgtagatttgctctggaaatatgcggcggcttggtgtaggtaatccagccgtgctcgaatatggctctgagtgttcttgaaattcttgacttccttctttcccttggctttagccattctcgaacattcaacagagcaacaagtggatctcaaaattgtgtgctgcaacctgcacttcgagaagagcttcccatcgacgctagacccaaagcggtgaggctgaataaccacgtgatgctcccttggtgaggtcttcgtcctaccgccttatgacttcttcccctacacctttgtctatcgagacctgccacattcccgcggtccatacgtcttctccttattacctttgtctactttcacttcaaccacacgtcatctctcactcgcaatactttttcctcttcttatcaaaactcgcctacttacgtcgccatgtctcacgaggaagatcttatcgactactctgatgaggagcttcagaccaccacagcaccggccaccactgctgcgcctgccgccacgaatggcgatgccgacaagcagggcgacttgactgtaaccggcggccgtcccgacaagaagggcagctatgtcggtattcactctaccggtttccgcgacttcctgctgaagggtgaacttctgcgcgccatcaccgactgcggcttcgaacatccatcggagggttagtctaactcattattcccacaagcgttcctccatttgtccaatctccaacgtccgtccatcctcgcgggaggaatcttctgtcggtatttggcaatcagtcgtgtttcgaatctgcaggcgacatgaggattattgctcctgaaaaaggacaatatgtctttacaatatatatacgtttggtcctgtggcgctcttgcgctaagcctgagcctatgttcccaactctcacgtacttcgtggagattggcgcacgcggtggaagactgtgatatttatcacgtttgcctccttgtgaggcgcacctcatgttgtctgcagaatatgataggatgtgcacaaaaagcctggcttttaagtgttacatatagtcatggtggtttgatcaagcggcggaagatgaccgcctgcatcaatttgatgttgtcgggggatggacggacattgcgagacgactatttttttttgcttcttctttcgtcgaacccaatctaacatcggctccgccttccaacagtccagcaagtttgcattccgacttccattttgaacgtcgatgttctttgccaggccaagtccggtctcggtaagaccgcagtcttcgttctcaccacccttcaccaattggagcccgttcctggcgagtgccagatcctggtcatgtgccatacccgtgaactcgcttatcagatcaagaacgagtacgcccgtttctctaagtacttgcccgacgttaagactgcggtgttctacggtggtaccccgatccagaaagatgtcgaaatcttgtccaacaaggaaacctaccccaacattgtggtcgccactcccggtcgtctgaatgcgctggtccgtgacaagaaattgtccctgcgcaacgtgaaggcctttgttctcgacgagtgtgacaagatgcttgaccagattggtatgtgcatgcgatatacgacttgactatcacatcttactaacattcttccccagacatgcgccgtgatgtccaggaaatcttccgtgcaacccccgccgacaagcaggtcatgatgttcagtgccaccctttcccaggagattcgtcccatctgcaagaagttcatgcgcaacccgctggaggtctatgtcgatgatgataccaagctcaccctccatggcttgcaacagtactacatcaagcttgacgagaaggagaagaatcgcaagctgaatgagcttttggacaacctcgagttcaaccaggtcatcatcttcgtcaagagcacccagcgtgccaacgagctggacaagctgttgcgcgagtgcaacttccccagtatcgcagtccactctggtgttagccaggaggagcggtaagttcatccgagttcggcattggctgcagcaatttgctgacctccatctagtatcaagcgctacaaggagttcaaggagttcaacaagcgcatctgtgttgccactgatgtcttcggccgtggtattgatatcgagcgcatcaacctcgccatcaactacgatctccccgccgacgctgactcttacctgcaccgtgttggtcgtgccggtcgcttcggtaccaagggtctttctatctccttcgtcagcagtgaggaggacgagaaggtcctgaaggagattgagaagcgctttgaggttgcccttccgtaagtttctccaattccaaactaaaatgctttttggcaaaaggctaattatatccacagcgagtaccccgaggcaggtgttgactccaccacctacatggcttaggcatgtctcggtaaaaactttgttgatttgaaatttcttttcctctttccaattgttatggcgcactagctcgggttttgatatgtttttctccgccgttgggcgctgcctctgccccccaccccttgtggctttgaagtgaggcataacccttccatgtatccgagaacagcaatggaagcaagaatgggttagctctgcacgactgtttaaccgtatcctggccgtatcctgacgggaattctgggatcacaatgtggagttgcgatgtcatagttatcgacgtctgcaagacaagtcaaagccgaagacaatcagatagaaatatgcgccgccctgcggtcgtgattccgaccagacgacccgaagaccctgctaagtttccgatcgagccggagtggatatagacaccagaattcaatatctcaactatgttcctcgtggtttgcccttaactgtcggaaccggtccacccataactctagggcgcaataattagcctccactataccatgtatctagaagctggatgtatgtagtcggtggttgcagttccaatctgacttaaagagcttcgtagcagctttggtcatcctttacccgatccttgtatgagcgatgtgattttgactgattcgacgcatcatactgatctgagcgagatatgtgtgctgtttaggatatctaccactcaaagtcaatacagcgagggtattcaatgctgcgacatatcagtatcttctggtcaaaattagaaaataaagagttcctgcatgctatcatgacaactgtcgagttgaacacacggcgaagaaattgggacattcgtgagtcgagtagcaagatacatataactaatatgaatgtagatagatcttagtagaattggcaaaactcgagattttctacatggaagtactcagtgctttgtatatatctctgcgagttagaagtaaacatacggttgaccgtccaacacagaaagtatcaagcataaccaaagcccatgacctggaatataatacagttacataatgcattaccctgtttgaggcgaaaatcaaagtgaaaacacgaaaaatggcttagcccaaagcactagcagctggaaaggcatcgggtagcgtatcaggaaaataaggcagagacatcaaaccctgtcccgaattttcaggtaaatggccgtcggccctctcacttcagcgtcggctgtttgtgagtgcagagtctgcgttcgcgtgatttgaatccgtaactaagcagatataatatagaaatgattgtactctgtactattacttagatcaagaccacgttgcgtaatacataataatttagctggcctcaatggattgacaatgcaaatcactgaatctgcaatgcatcaaggactgacgtgcccggaagtgcaaggaagagtcgggatggcatcaccgcatccgcgtctccgagcccggttcaaacacaacaaatgccatggcgtgatcaattccgtcagctcactacagagccctggagctccgagggaaatatctatgggccctacaacgtacggagtactcggtatgttgtacggagtactctatagttaagtaccagctaatactaagatactagtgattccaacacgttatataaagtagctctacatcgtctcctttccctaggatcattatggttaatatgcttgattaacggctacccccggggggggggggggggggttannnnnnnnnnnnnnnnnnnnnnnnnnnnnnnnnnnnnnnnnnnnnnnnnnnnnnnnnnnnnnnnnnnnnnnnnnnnnnnnnnnnnnnnnnnnnnnnnnnnnnnnnnnnnnnnnnnnnnnnnnnnnnnnnnnnnnnnnnnnnnnnnnnnnnnnnnnnnnnnnnnnnnnnnnnnnnnnnnnnnnnnnnnnnnnnnnnnnnnnnnnnnnnnnnnnnnnnnnnnnnnnnnnnnnnnnnnnnnnnnnnnnnnnnnnnnnnnnnnnnnnnnnnnnnnnnnnnnnnnnnnnnnnnnnnnccggggggggggggttggtatacgaagacaaatatttaggtttaaaaggacccgattgggtaaaaagggtactaaaccagctgctaagaagctatttttaattatctgcgatttaaaagttttaattcgtgcagaggggtatgctttgaggaagtcatctttattaatatggttgatcccagcctgtattttcattttaatcaaccggctgtacgaccgctttactaccgcaaaataaccgatattaagtggttataaaaggtgagataaatgcagtggtatataaattagtataatttcattttacttataaatcttatcgaattttagggttaaatggcttccgtgaccattgagtactagaagccgataccgatcctttaaccgcggaaaagtcgatagaataaagagcttttaaagctagcgaagtctaattttattagaagtccagccatttagactaactttaaaacgccagtcatttggaaggttattaaaccaagattctatatagaccttacctttgaaaataatatacagaaggagggcctaccccgccgcgtttatatattcaattgcagttacccactcgcaatttctgggttataaaagtgatctctgaccgtagtattcacttctagtaataacctttgccgttacggttaaacctattgcaaaaccggtctcgtcgaagttataaatattatctaggtcaattctaaattaaataatggttttttgaataagattaaaccattctccaataattttcgggtcttcatattttacacgttcgtaattatagtatcttgagaatcgggaggaaagaagaggataccatttaataaattctgtaacccagtttttaccaactgaaagagccggggtagatccacgttatttgaggagaagattcgccatttctcggaccatagaaggccggggggcccctccacgagaatctatagagattatccatttctcaagcgattcttcctcagtttctgtcaatttatgaccattggcgcgagtttcggcgcgaaaggggcccaatggactctcgcgtcatactacgatattggtcacggatgtgtcggccttgaggccctccgaagtagacggtcaactccttgggatcattccgcacgatgtcggtaatgcggaagccatagttatcggagaagtaggcatcagcataatcccagacctgctgtgccgctttgctttgggtatagagctgcatacccatgcccttttgttgactaccctgaccagtgaaaaggaatgccgtctcctcaggttcgatctcagcttctccacgcagaacggtctcgccgcgcccgacgtgctttgcctccactgagacgatcttgcgtcccgccaacatgccgatgtgctggaagacgacttcaatcttatctcccggtagcaccatactcgtgaatgagcagtggaagctacggaaggcgccgatggttgaggcacaggtgtagtgttcgacaagtccacgtacccgtgccgaggtgtacatgctgtgcgtgatcagacctggtagatctgcatatcgcgacagcgacgcggacacatggatgggattgaagtcccaggagacgtgagcataagcctcgttagagtgtggcatagtgagaatcaaagattcgccatcgttagtcaagggactaggctgatcaaacatagcgcgcttctgcactggactaccatgacgcttgaggtaatccatgacagggctacctcggcaggtgactgcgtgatagtctacggtcgcaatcggccgcgaaccacctgggagcgatgaattcacgcgaacttcaccaacagtagtaacggtcttgaaggtgtccttgctggcgtattggtaggtcgaacgaagtacgaagaccaaagtctggttttccaggtcgagcgaccgatccaggggctggaaccaggacttcgagttcaagatcgcaacctccatcgggctacgggggcagagctccatctcttcctcgtccactttgcggaacatattctcccagtctgtgtggtggcctcggtagaggaattgactgcttaactcgagcacgaccttattctcatggtacacatccgcacgtacctcgaccaatttacctgtctcctcgatcgtaatggcttgtatacgagacttggtctcaagtgcataacctgcctgaatggggtccgcatctgcgggaatgcggaagccattggtgagatgcaccagcgtcaacagatcgacgtcaagctcccgcgagaaaagcggcttcatcaaagcttcccagccaatgacgacaccaaagtccaacggtgccgccatccgtttgccacgccgcttgctagcggcatcgctggcattctgtacacaatgggagaactcggcgattgagtcggccgtcacctcaaactgcgattcgcggaaggtgtcgtggaccgagggccatgtctctggtggttcacccgcgaaccagactctatagtagaagtctttgacacgctggttgcggccttccataatttcatggatgggagcgtaaacagcctcacgcctgaactggaacttcaactgcagcccaatagcggcacctccagcattacggtagttgatgatctcaagcgtgataacgctaggctcatccactcgcacctccacgaccttgaccggctcagagtgtggccgatgttcgaacagcgtgattatcggatctgccgaaaggcctccgtggccctgctgcaccatcacgtatgattcacgcgtgggctggaaaagccgccgcagcggattctcgcagatggctcggccctgcacgatcgtcgctgcgtggaagaatgcttggcgccagcctccattggaaccgcccaaggccacaagccattctgctaacgagggtgttggtggcgcaccgggcgcaccgtccagtggtttcacttcatataacatcgcgcctgtgtttccgacgggcgagcaatgaatgcccagctccgcaagtcgccagtcctgtgggacagagtatgggctgaagcagtcgacaatagggataccatcctgctggtattcgggatcttgctgctgcaggcactcaatgtgtccatggtagatgttgcctaaaatgtcgcctgccggctcgtccaccttagttgaatatcgcgccgccactgggccgtacccggccgacatcagcgtcagcaacagctgcaagatcctctgactgccacagcgagtcttttttgaagtaagtctcgaagttttcgtcgaggacagggacaaacggtactggctttgtgccgcgtctctggcatagaagcaaaaagtattccgcatcttgcgtgccaataagctgggcctcagcggtcggcaaccgcttcaagatggcgttcagcgctgttgtcggatcagcaagagcctcgtcgccgttgacttcgctgagtccggggccgggggctacgtcgccaatgcgggcatccacgcgctttaggaaatcttgcaggaacaagcggtaggaatcatcgatccagcggccctcagccgacacataggtaagcgcaataaaacggcgcagaacctcggcgtaagtcatctcctccaagtcgataacagatccctggacatcgcacccaaaccagaccttcaccgaatcggtattcagtcgctgaatcaggtagtcacggtgtttctgcagatacgcgacgcgcttactacgatcaaggctgaagacattgcgatctaactcagcccatagttgcacaccccgcgtagccagcttatgaataggttcccccatctctgaggttacagtcataatgccgccagctggttgtgtgtatgtctgctcccaatcaccttcatcctcgactcctggcgcattcacaattgcctgtttcacagctgggctggtatgcgcttctttggcggtcatcaaacgactgccgagaaggataccatcgaagggcatgggcgggcggttataccgacaggcccaatcacctgttaggtaggggaatgtgtcctgtgcaccgccaaagccactgcccgctacaagaataacgttctcgcagcggcggatggagtcgtaggcttgcaagatcggttggtggaagtcctcgaatgagtggtggccaccacctcgcccacctgtccattggagtagaatagggaaggtgggatgagccgatgcgatgtcgaggacttggtatatcgcgggtaaagtgccaggcttgaagcccatgtggcgtagaccgagctcgttgatgtaccgagtggccacctcgagtgaaggcacgcctgcgccgatagtgagtccctccaggggaacgccggccgcgcgtaatttggccagcagcggaatctgccacttcaccgcgtgaggagcggcgtagatcatgttgcaggtgatgccccggccagcaggtaccgcgtccagcagcttgtaaacgtctgtctccaactgggcggcttgatggaatccgcccagtgccaattcgacatgatagccggcgcgcataactgccgcacagaaatcccaggctgcagttgtgggcgtcattccggccaccatgactggtggcaagcccaagaggcgactgagcttagtatcgacaagcacgccgccgccggcaatctgtaccaactgcggtcggtagcgattccgccatataggtccgtagacgagacccttgggcgcaggattccagttaaagaactcactgcgatctcccagctcggtgcgggagctggagatgcccgtggccaggatagtacggacgccagtaccctccttgagtcgattagtgagagttccaatgccagatgcaccatcaggcccaaaagcaagaatatgcgtggatccgggaaaatgcacggcccgtggccagacgacttgctgggtcgttatcatcgcaatgagcttgggaatcaagttgacggctccacacttgcgtagatctgtccctgtgtgggtgcaaaagacagggattcggagttggtcaccggttatggtgaaatccgcgacacgctccagcacgcccggagcgacatctgttagatagctgctgtggaaggccgtggttattggaaggaatctggtatggatctcaggctttcgctggctgaaaggaatccgatgttgcaagccctttgccggagctttcacctgtcgtagccaaacattaaacccatgaagtgacagtggcggtccagccaaaacggcattggtaggcccgttgattagagctatctcaatgcgggcatcaacgggcaaatacccattgacggaagctacataggtgcggagctgggagattggacagtctgccacactcagcatgggtcctggaaagccctcgccgttggcttcggcgtctgcgacaacagccggcggcagctggcccacggcaaattggtcctggctggcagttccgatggcgagcagcaaccgaagcgcatcgagcgcgagcgcgtcgaattgcgtccatgattgtgccactacaatcacagtggctgggatgatgccttgagaatgtcccgtggctccagcaagcgcggtctgaagctgggcaggtgtggtacccactatgcgtccgacgactcgataccaggccagctgcaacaaaccgatgagcggcatactgatagacgcaccgattaggtagtcagatggtggcgtacgatccgggttctcgagccaggtgactatgtccatgccgttgtgatagaatcgactaatgctctcctcacgggtctcgcgctgcagcatactcgagactgacggaatgaggtcttccaccagcgggcgataggtctgccagagcatccgcagctcttcaaagtaatcttcatcattgccctgcccgccgaacacagcatatagtcgtgctttgcgttgctgcgcggcagccaggagcgcagaaggtgccgctggtcgactgactttgcgcagaacatggcgcgcacgtacgtaagcagctaaaatggccgactcggcgtctgcggagatgtccaaggcatagactacaccatggatctcgcgctgcagtagaatatcacgatcgaaggtatcgagggcgatggtcaaaagatgtcggagatcgtcagccaatccatgaggagattgctctaaacgacgcacggtaaaaccaataaagcgggctcaaagctccaccagagaggatatcggctcggccccaccagcggtttgaagatcatggagaaagtcatcgcgcagctgaagcgcagcggggaatgaggcagtagaaatggagagggtatgtgtgaaacggccatctgtgatggtgaggatttggctgccccaaatgttgctgggcgacgacgaggtggatagttcatcaggcgttgaccagttcgaggaagtcgaagccgacaagacagccgacggccccggcaattcggtcgagatcaacatgacagagaaaaaattgagccgcctaggctaggcgtcaacatatttttttccccatcgcgaacgccagaccctgccgtatattcttcatttctttgtctctttttctctttgtctaagcatcgtcgttgacggtggggcgcaatcgtgacgggtgggtcttgtgagatgttgagccctaagcgtctcaccgtgcagcattcccaaggttgccgccaatctgacacaccaaaatagcccggcctctatacgaggctagaggcgcttggggggccagaaatgcgtcggaccaatgccgatcaggcagccgttctaaaggccaaaacccgacggctgatcgactgtgagatttaattcaatttaagaatgtcgcccgtcagcaccttgtgacttttctccgctcgtctgttctgttgttcttctatcactgtctttgatctctgagtgctgttacactcttgttggccgttattatgggttggccaactcattgtggtatgttcttcttctattaatcttctgggccttgactgatcttgatagatttgtccagcgaggacgctcaatatgcctactgcgccaatgggcccgccgctgtcttcttcacagttatattcggactcacctggatcgctcatttcgctcaagcggtcatgtaccggaagaagttctgctgggtgattgtagtgggcacagtgtggcaatgcatcggaatgattatgcgcacctactcgaccatcgatcaaaccaagtcgacgaccacggccgccggacagctgttgattcttctgacgcccttatgggtgaacgcctttgtgtacatgatcttcggccgcatggtctactacttcttaccagagaagaaggtggcaggcattcgggccgaaagactggcccaaatcttcatctggcttgatgtgaggtgagtttcgccccgaaaggcggccctgggtcaactgtccaggacactcttcttgtgtaatgaaactagctgactctgatctgacagctctttcattgttcaagcaactggtggtatcatggactcggactttagcaccgagatgaacaaaatcggactgcacatctacacagccggcattgcagcgcaacagttcttcatcctgtgcttctgcggactactattcgcctttcaccgtcggatgcaagagcgtggtagcatttctcgtggcggtggctggcgcccattggtgatagccatgtgggccactttgacattcatcacggtaggtcacctttccaggaccattagttacagacgactaatgcatattagattcgaatcatctaccgtctgattgaatttgccgataccgacaaggccgggacaagccccttgacccttcacgaggcacccttttactgcctggaattactgcccatgctctccgccatggtcatctggaacatctggcaccctggccgttatctccaaggagatgactgtgactttcccaagaaagtaaagctgtctcgcaatgaaaagaagatgataaagcaagaagccaaagatagcaagcgccggggtcatcgtcgctcgtctagtcgtaagggtgcacgtgtttctgagtctcacccggcgaattcgttcgacgaaggggctctggagtcgcagggttatccattgcgaggacatagataatcagctacatatcaagtagggagtgcatacagagagagtttttcagacatgatcagcaaagtgcctattgtaattccaagcattcagatttactttcaacagttacttgtgtcacaaacactcgaacatgtatcaatgccggatttcaaatactatctgcattatcttacaagttgttcaatctaagtctgtcgagaacggacattcacactggcaagagagaggtataagtactaacagttagagggacattctatagggtagtcctggaagatcagtagcaaaacctatcctccgtggccgcacgaatcataagcttaatcaggcaaatggaaaatctaatatgatgtgaccggagttttgttggaactcttgtgtgtaaatagaaacagagagtatcccgctcacctgggcaggcttaacctgccactagacccaggaaagaatgcaagaacaaagaagagacacctgggtacgctagccccgtcccagaggcaaatgaaccgaagatgcagagaaaccagaaaattgaagatgataatatatcccaaacccattcttatttatagaacagcacctatatgcaagcatcataaaccctcgtctgcccctcaaaatctgaaatatccaactgcaccccagcatgaaccaacatctcaactagttcttgctggttcgactcacaagccatatgcagcgcggtacgtccccaccaatcctgatcattcacagcacgggctgaatgctcaattaggacgcgcacaacccccggctgctgagcctgtacggcgatatggagtgctgtctcaccctttcgggtaacccagctgattaggtctcgaggtggggagctagatagtagcagtcgcactacacctgcgtgaccttgttgcgcggctgaatgtaggggcgtgaagcccgtgctgtcgggtagggcgggatcggcaccggcctgtagtagtactgctaatacggactcgtgaccgtatagtgctgcgcgatgtaatgctgtgtgtccatgtgctccatcaggtcctcttgtagtggagctgccggtgctctctggggttccgcggggggtgtgtagaaatggcggtgcgggtgttgagcaaagaaggtctgtgtcgattgaggtttggaagggatgggcttgattcttgggcgaggtcgagagcgaatcggagccagagcccatggtcttcaaattgaagatttgatgtgtatcctcatccagcgattgtgcccaggggcttccggtgaggccaacttgatccagttgcgaggtgtatgaatgtagatcggacggcagttgtagggggtcctgctgttgtatatgatggtgaggatccgcatatggttgcgatggccattgccctgatgattgtggtcccacagcaggttgctgctgtggtgcccctggttgagaagattttgagtctagaggagaagacagcccaccggcggccgatctggcagtggctttagtctgtgtgctgttctgggatgtgggattctcgtcccccttgcgtaaccctaaaactcatcatcagctctgtgatctaccaagatcgtcccgctctatccaccgagtctcagtctcaattttgcaaccaaagacaattttcctactcactttttcgatatccacgttgagcaattcgattttgcgcccgacgacgctccactgggtcactgatattcgcccagttctcgcccagcactggggttctaatcacgaagatcatcgatttagcttaggcaactccaatccaatttggagtcagggggagggggggagacgaacgtgatcatgatgcatagaggctcacctagcatggctatgcaggcaacaagtaaaacaaccacaggcggggaccactcattcagatccacggtgtcacaaagcagtctcagtcatgatacgcattaattatccgcatggctctggtcttcatctccttttaaatcttgctgacgaggtggcagtcaagaaccaaccatcttaggtgctgttcgagcgcatccgcgaacggcggcagtcaccatcgaccgtacccactgataatgcgcacttgttgcgtacgcatttggatacggagtttccttgatcgtacggtctgggtacccaggggcataggtgccagggtcattttcggatttaatgcatgcaatggtgccttaatgccttaatttggactggcaaaatattaaaatacctgaattacaattacagaagcctatatacctgagtatcaggcctatagagcgatttctgctatacaactccatatgtcatatgattctcaggcggtttggacctgaactcagaggtaatagcgatctaatttattatatctcttaagagaaaataatatataacgtattcagtaaacgagctacgcaccccaaaacacatagtaaaagcgataaattacaacatgatattgcaacaacggtggtcaatataaactttatcttgtagcccatcactctccatatgatatctgatcactctagggagttttgagaaatttgatataatagtgatttgagatatatatatttcctatagttcagtgatgtaattttcaataccgcaatgatgcaactttctgatttatttgaaattgagatatattgctaaacatgcttatcgatggctatcgacaagtaatgaaagcaagttgagacgtggttgttgagatataaatgtggaatatgttgcatttactatggtgttttggggtgcgcagctcgtttaccgaatacgttatagattcagctgaataaaggtagataaggaggagagaaagaggaggagaagaaaaggaaaagagaagaaagaggggggaaggtatcacctcggcaacggatatttactcacgcgttagtcaaagggttcgtccggcgtactggttattccgtgctgaaagctttacaatacactgtatcctggggcctgaaagcggtcagtgttaaggctaacattaggccaaattaaggccaaattcaggtactaaggccacaatatactacattaaatccgaaagtaaccctggcacctatgcccctgggtagtctgggtatactccattgtaaaatattcagcaaaacccgtggaaaaatcctttgttcctggttgcacacgctaatgcagactaatggtctgagagtgttttcgtttgaccaatagccgaaatgcctcagcgatcgggctagcggcggggtttcctgcccaggtgccaatagggctgttaaaatcacttgaaatttaaaaatatcgtttcaatttcaatttcaacgctaaaatattatttcatttcaaaatcggtctatgcctcaggcatggacccactcttagtagtccaccaattagataccttaatttttcagagagccaataagattatcatagcttactctaagcctaattaggccgaatacaggctcttacctacaccgcctagtattcttcttagaccgcctacgcttatgtagcgctagtccgctagaccacgtagagtgcaatgtataggtcaaaaatatatctctggtaatctaggtaagaaaatgctccctatagcccctatatccggccaccccgtcctgcttcaggtactcttatacgaggccgaactatataccgataatatctaattatcctaccctatatctatagaagacttatagtcaaagagtcgctctgagtactactatcgctagtaccactatcgctagtactactatcgctaatactactattactagccctactaccgctagtaccacttcccttactactattagtactactagtaggactatagggactattattattattattactctagttatcactcttactatcttaatagtttagcgggtttataaagggactgtatcgctatacgtaagaactagcctctaaataatctatagggcagtgtatatagtagaatttccttccctatcgttacctaaagcaggtattacagctagcgatacctttaagttagtcatagaaccagcctactaaggtatagttacctctacagctaggcttaagtgtgaaatatagttaatactattacctcgaaatcactaggtatataattatattcttacctataacgattctactatattcccttcggcctatcgttagtagcttaaagtacctagtatagaaggtctagaaataccgatatatagtagataggttattatatactatactatatattatattgctatcgctaataataactaggtagatatcctagttaactttattctatttaagtattaggtttagcggtctattattagaagtaagggtaagcctaagctctctagataagactttaggtagatattatcctatacctaggtagagttagtaagtagctagcttctaacctaggttagggtcttatactaggcctatatatatttagtatatattaggaagatataaggtttttaacttactataggtatatccctatactagataagggtttatagtattctagactttatttaaagtaaatatataataggaatagctatcggtagactagaagactagaagggctactatttttataaagataagatatacttaaacttaaagactaagaaaattttagaggacttagaggatagagattctagagtagaaaggagagggtttataactattctattaataaagaagtattccttctacccttctaagggtatttaggaatatcgctttctattaccttcctaataaagaagaggtctatatagaattctttagttctttagttctttcttatatataatactaatattataaagatactcctataataagaatctccctttattactatctaaccgtttttagactattagttataagcgactgtactaggatatttttataaaggagagttagaataatattaataacttttctaataggttgatctctaggtttaggataaagtactttaggtatcttagcgcgaagatactttatagaatacttagaggatagagtagttagtattttttattttttccttatagcctaggtcctatagttaggtagctaactctacccctgattctattatagatctaggttaaatataacttctactctatatcctattctagaaatactatataaattattgactatctaaggggaaagtataagtaaatccctactaagatctgtataatctttattaaagaaacgaagaaaggtaaaatagcttaaggacctattagcttttaaggttagggtagctatagccttaggaaataaagggataatactctagctagatagctttactagtctagctggctatttttacttatagacgatctaggcttctaggaattctatttacttatagatagtacttataagctacctacttattaagctattagtaccgaactccttaataaatagtttattagcctttagaataaggttaatataagattaaagataatatagtatcttaatcttacctataataagtcgactaataaaagtagataccgaatctttaatatcttattcagttcttagtcctatagtatctattactatagagataagattaaggatataagtataataggggaggaagttattagcctagtctttaagaaggtataggagtacctaatctaagaaggtaataggttacctaattagttctatattaactctctagctatagatatatataaggtaataaatatctactactaactacttagagtataacctaagataagttatatattttatatcctatataacttatacagcctctagctccttctaaaggatatcctcctaagaagtaggattaagagtacgtttaagatagtattagagattatattattctttaactcagtactagacatcggcaaagcccacccggcccatagcccagcccagcccaacccccccaaaggccgggggtttgggtgaactnnnnnnnnnnnnnnnnnnnnnnnnnnnnnnnnnnnnnnnnnnnnnnnnnnnnnnnnnnnnnnnnnnnnnnnnnnnnnnnnnnnnnnnnnnnnnnnnnnnnnnnnnnnnnnnnnnnnnnnnnnnnnnnnnnnnnnnnnnnnnnnnnnnnnnnnnnnnnnnnnnnnnnnnnnnnnnnnnnnnnnnnnnnnnnnnnnnnnnnnnnnnnnnnnnnnnnnnnnnnnnnnnnnnnnnnnnnnnnnnnnnnnnnnnnnnnnnnnnnnnnnnnnnnnnnnnnnnnnnnnnnnnnnnnnnnnnnnnnnnnnnnnnnnnnnnnnnnnnnnnnnnnnnnnnnnnnnnnnnnnnnnnnnnnnnnnnnnnnnnnnnnnnnnnnnnnnnnnnnnnnnnnnnnnnnnnnnnnnnnnnnnnnnnnnnnnnnnnnnnnnnnnnnnnnnnnnnnnnnnnnnnnnnnnnnnnnnnnnnnnnnnnnnnnnnnnnnnnnnnnnnnnnnnnnnnnnnnnnnnnnnnnnnnnnnnnnnnnnnnnnnnnnnnnnnnnnnnnnnnnnnnnnnnnnnnnnnnnnnnnnnnnnnnnnnnnnnnnnnnnnnnnnnnnnnnnnnnnnnnnnnnnnnnnnnnnnnnnnnnnnnnnnnnnnnnnnnnnnnnnnnnnnnnnnnnnnnnnnnnnnnnnnnnnnnnnnnnnnnnnnnnnnnnnnnnnnnnnnnnnnnnnnnnnnnnnnnnnnnnnnnnnnnnnnnnnnnnnnnnnnnnnnnnnnnnnnnnnnnnnnnnnnnnnnnnnnnnnnnnnnnnnnnnnnnnnnnnnnnnnnnnnnnnnnnnnnnnnnnnnnnnnnnnnnnnnnnnnnnnnnnnnnnnnnnnnnnnnnnnnnnnnnnnnnnnnnnnnnnnnnnnnnnnnnnnnnnnnnnnnnnnnnnnnnnnnnnnnnnnnnnnnnnnnnnnnnnnnnnnnnnnnnnnnnnnnnnnnnnnnnnnnnnnnnnnnnnnnnnnnnnnnnnnnnnnnnnnnnnnnnnnnnnnnnnnnnnnnnnnnnnnnnnnnnnnnnnnnnnnnnnnnnnnnnnnnnnnnnnnnnnnnnnnnnnnnnnnnnnnnnnnnnnnnnnnnnnnnnnnnnnnnttgtacagagatcagacgaattggtaaggtgatctgggaatagcttcatttttaatatttatggatagatcattttttttagtatttgtgcgtagattagataaactagtcaggtgatctaggaatagcatcatttttggcatttatagatagatagattagatgaattggtaaggtaatcatgttttttaccagactaaaacaagtgataaaaacctataatttattaatcttatataatctgacttataagcgccaagacctatataaaatacaaaaatgggctaaaataggcccattatgggtttatgggcttagcccactgggctatgggctgggctgggcctaggggagctgggcccatagcccatatgggttgggctatgggctgaaatcttgggcccatgctgggctttgccgatgtctactcagtacctctataactaaatcgatttcagaaatattaggtcgaaatctactataagatatccgcgttcctagtatctataataatataatagggcttgtaatttaagatactctacttagttcttaaatactagtaggcccttaagtactaggcccttaatattaaaaaggacgataggggtagagggaaaaaagccttaattgcctctaccttattagaacctaccttttaggtagatctcgataagttaatctaactcctagagctaatctataaggcgtagcttatatctaaaagctaggtatccgatcttataaaggtaagtctattatatataaaatctatatataatatatacgaagtctatatataatatatataaagtatatataaaacctttatcagcctttattctaataaagataggttatttcttaatagattttaatctaggagtaccttaagacctatatattaatatcaaaattttaactaattatataggaatacctagaggataaaagcctaaatagatttaaatatcgatttaaccgataaattaagctaatctactagcttatattttatctttagctatcgatagctatctaagatccgtccttttccctagtactttaaaagctaataaatatacttatcttaaagtataggggagagcctactaaaaagtagttctagtaattttagaactaataatagcgttttttctatactaataatagtagtatctagtctaactaggacctagaggacttctagtataaggcgaaagtattcgctccttagcttactaatcttaccttatatagctataatactacagctaatttagttaccttagagcgggcattttctactataaactttatttactcgaaggtatacaattcgcttttacctaagaaggttaataagctagtctatctccggataaactatcgacttataagtaaagggcctatccagtagcctgacctagaaaaggcgtaggattagatagaccagtttaataaggagtagattattagaaatcgcttcttccaggatatgacttctcttaagcctcagactgaaagccttagtctaggaaataagctttctgactctaagtctactaataggggtaggtatattgtaataagtgtaaagcgtccttatgacttatataactaaaaatttactaccagtttttctgccttttttttctgcttatattacaaaatattactaatacattaccaatatattactagcgccttagcgtgaaacaattgaaattatattttaaatttcatgaaaattaaaaatataatttcaattcaagattttgaaattcaatttaacagccctaggtgccaatgctacctcctgttttcagagcaggttttgagttcgactccagaacccgcactgctccactggggagtggcttggtcaaaaggtacgagtacggagtaatccgtgtttagaccgacttcaacgccctacaacttccgtatgacaatcatgcgaccgagttcatctatatgattggatcatcatattagactgcccatcggtaatcggacaattgaggagcaagagcatcaagaaatcaattctgattcgtcatgttcgtaacagtcccttgtctttcatacaaataatcggggctagcatccatcgagacaagtacttccaaggtttggtcctcgggtaccaagctttcaggctaaccctccttttgtgatctttcctgatggggtatagtaggctagggtttacgaacaaaggatgctcactgtgcagcaggcctagaatattagtccccgacttctccactttgtacgttcggaagctgaccgacctgagttttatttagatgaaggctaccgttttgctggtagacaatttagcgcgttattgaacactttaattcaatttcggtttaatgccgatccacatcaatttacatagaagtatacagttctttacaccgattgaagataatcgtgatactaccggcaatgcgactttggatctgaggtcaggcgtccgaagtacagcaactaaatggagtgtcagcacttctgcagctgcagctgcatgcccttacactattgatgccttcccacatccctccgttcggggtttattgaaaaccaaagtggactataatcaaagggtcgatccaagtatcgacaagtgatgctcattcttctcaaacagaagtcagtcaagtcatcgaaatattgtaacttcacgcaagctctgctgctagtagagaagaagacagactgtcaaatacactttaaacccagttgaaatgtggaattgatcaattagaaatgtgcctatagatgaaaaggcgctgttttgtattattcgtagctctcagtgttataagtagtagagattgtgaatggggtgttttgtccgcagacagggtctcttcgatcggtacggagttgtgggtgtcctctctcaataaacgcgaggaatcaattgtccatgcatcatgtcggagcctatggtggattataactagccattccagagcgaccttgcacatcaggcagcaaaaatggaccaaacaggggcttaacgaatacaacaaaaatagacgagcggccttagcgccaatcgatactgatctgcctgctgcttctgcttagaacctttccaagtcaatgaaagccagaatgaggtagcctgaagctcttcatttatctaaaagcgcggttagttcgacttgtaaggttacattgattaaacaatcttaccgcaccaccgagtaattccgaaatgaagctcccctctctcgtcacagcgagtcaattgacttttcccctaacatttcaaactgcgttccacacaaccagcaatacagcctcgctgctttcagcacaatatggcacaacactcaacgtcgacgtgacgttcgccaatcagacattcaagcttctcgtcgatacaggcagcagcgacacctacgttgtcagaaatgacttcatttgcatcaatcaaacaaccaaccttgagatccctcaagcggactgccagcacgtctccccagggtacaacgaatcagacacctatcgtttgatccccaataaaatattcggcatacaatacggcaatggtatagcgagcggagtcatggcctacgaagacatcacattagccggtattactgtccccggacaagccgtcggaatcgtcggccacagcaatcccatgggcgacggcataaacagcggcgtgctaggcctcgcctatccctccctcacctccgcacatccaggagaccataccgacaatacaacattttggttcaatcgtgaatgctacagtcccttgttcaacaccatgtacgaacagggccttgtttcagaaccctacttcagcattgcgctcgcacacacgccgcgaaacctttctatgccaaccttcggcgggtacctcactttgggcgatctaccgccggtggcgtatgatccgaaatttgccagtgttcccgtagaaattttggaaaacattccgcccagtttcacctctggcaagcgcactcgatcatattgggcttttaccgtgtctgctgtgacatttggatccacaacaaaagtggatctcaccacgagcacgacctccataactaccaacagcatggagttccaggtatttacagataccgggaacgactacagctatctgcctgctgtggttgcggatcccatcaatgccttgttcaatccgccagctatctacaatgagacgctgggagttgctgtcgtcaactgtaatgcacagccaccgatgtttggagtacaaattggagaccagacattctatcacgatggacaggatctcatttatcagaccggtgatgggtactgtgtctcaagtttagtggcgtcggagcgtgtggcgtttgagggcatcatgttaaacattctgggtgtgccgtttttgaagaatgtggtgtccgtttacgatttcggtagaaatgagttgcgatttgcgcagaggtcggattaaaaactggggttggggtagtgctttatatatttagatgaaccagtatcgaatcacgattcatgaccttgtatttagtcaatttctcaactggatagggacattcgcatccagttcaattctagaattcatctcttattcaaacctctctttggcttgggcggatactttggtatgggcaatctcttgttcgtgtctcctgacccgctgctcctgcatgggattaaacagtaaagctgccggctacgagaatattatcgtgctcatcaacaagctgcagagcaagaaactagctccagcagcaaacatagacgcgtacgaaagctgggtcgttctggagatttcatcaatggccgccatttattcctcggtgctggcacagcggaggagctggataaccgcatcggtgattgcgttggggacttagccctcactagccgtggagaacaccgactgatcagtctatcaacgctcttgctttcacactaatattaagatcaaagtcgacatgagtctcatccagctgaagacaataacggccctctatccactgactctctccgcactgggagatttctttacgaccagtattcaacgccccagggatggtatagccggtaactccagctgattgtcaaacgctgggatcggccaaattgctatgatgcaagatcagcctggtcctaccgcgacagtctgcattcgatattaatcaaattcaatcgagctggacgattcagacactcagcatggtaggagccagtccttgccacaggaacctagatctcgataccatgacgaacattccggtgaagaaccactacggggatcggtccagttgaaaatttgaactcaagacttttgaacctgaacttggtgaaaaggaactactcacgacgcttccatcgagaatgagtcctcgccgtgttgagtgtctcctttattcctaggagcaagtggcggcagcaagagcgataatccgttaggaatcaagacaaaaaaaaatcatgaataaaacactaaattggatttacaaaccatttgactgaaattttctaagatattcctcaatattgtagaaccaaaaatagagggttagatatttcccgcaacaatgagagatggtatcgtgaatacgagacttaacgagctgaatagtggtatagccgtagaatagtaatgccaataaatgtggtcccactatacatttgcctcccaactagaggcgaaacaactcaggatcgaccgccatattaataacgccagcctttcgttgaggggacaacgggcaagagtgctaggtgaacgactgcattgggatatggctagcgtggtgcattttattgaggtgagctgctgacttagctgttccaactttgctcaggtgacgctcagtgagcgagttcatccagcttatgtaatgatcaggcgatgctcagcgagcaagtgcaagtttaatgattatgtaatacttaagggcgtgctcagttgtactcagtgagcaaagagcggcaaggggtgagcacgaaagcgaaaagggaaagccatctcgctcggcctaaaatccggtgtatatgtacgtacctagcagaggcgatttaactatgtatatcgcggagttactctgcggtgacggcgaattactaatttcggtttagcgtgcctctttgggtctagctccctctatatgactgatatcgccgtgcgtatgtctataaagttgcctttatcgccccgactgttactcgccgaacgtttcgacggttacggtccctttcttactatctatatcctatatatgtcctgctaataaggtatttttgctattaatctagcttactaagccctactgcccccttggttactagtgtgacgatctgagaaggatcgtacttgctaaacggggcaggagcggtcacgtcctcgtacttgccaaacgaggaaggaacgactatgcccttgcaccttcctaaggacgaacgagattaagcgagacaaacgcaagggtataagaagggaagaacgcgcactcagatagtttctctttttccnnnnnnnnnnnnnnnnnnnnnnnnnnnnnnnnnnnnnnnnnnnnnnnnnnnnnnnnnnnnnnnnnnnnnnnnnnnnnnnnnnnnnnnnnnnnnnnnnnnnnnnnnnnnnnnnnnnnnnnnnnnnnnnnnnnnnnnnnnnnnnnnnnnnnnnnnnnnnnnnnnnnnnnnnnnnnnnnnnnnnnnnnnnnnnnnnnnnnnnnnnnnnnnnnnnnnnnnnnnnnnnnnnnnnnnnnnnnnnnnnnnnnnnnnnnnnnnnnnnnnnnnnnnnnnnnnnnnnnnnnnnnnnnnnnnnnnnnnnnnnnnnnncttgccgcaggaacgactatgccctcgtaccttcccaaaagaacgaacgagaattaagcgagataaacgcaagagtataagaagggaagaacacgcacttagatagtttctctttttcctttcttcctcgtacttagaatttgattggaattgcactcttttcttctgaatcgaattggctcgtaacaactagcgcgaactgactaatcctttaccctcgttcgatctctcgagtactctatacgtagctttacctcacctatcctataacggataaaggtccgtacaagagggaaacacatataaacctgcacaggctcgggaaggaacatctatgtcattacatatctgtttcgatatcaatccgtaacttcaaataacgcacttctgtacattccttatatctaacctgtgtatcttaacaacaatgttattccctggtctaattattcttagatagcgatcgataaggatcttaaactcggcatcttaatattaaggtaatcaaacctctactttattatggtttcgaaaattacattgtctagagcttgaaatatcttgaaatatatatatcacgatcacaaagtcataaaacttatctaaacttagtaaagaggctagatatcacctaagaagtatcgagctataagaaaaacctcttatagaccaccgttattaagatatcaggttgtaatttatcacatttactatgtgttttggagatggcgggtcgtatgtggtggcggctcgtatgtgaattacgttagtggtatattagtagtcagcagccacgtgtagcgattatataaacacataccaagataactagatctcggaggagaaccctccttttcacaaattacactcattttaccctttggtccagtatcctactgctcgtaccatacaaaacagcctctcttttgttcaacatatatcttttatctatgatatacgcgccgagggcgttgatatataatgaatacttattcctgtaagggcgctaaacctaacttagctagtattatatttaatggtctaacgcgagcgctgggtgaaatgaccacgatttcccctcgaaagaccacgcacaaacgtggtcttttcgccgtcaccccgacttactccgtacaatctttccgtacaatatacggaatccatagctctgtttatctcaactccgctagcttaatcaactagacataacaagaaatagcgtccctcaatcgtatcagcccagggccattagcctatcataacctctgatcgaccctcttagtacaaagtgttttctgtattcacaaattccaatcacgcttttctctcctttttattttacatccgtgatgttccgagggaattcgactgcagatggtagtcgggggcccctgtgagattaacttggtttcagtgatattaatggtcaaacttggtatttaatattatgggtacttcatatatatacggagtccaatttcaggcctatggctggggcgcagtcatgacatctgtggctttcccctaccgtaaaacctttcataagaccgattgtggctgaagctgagcaatacgatggcttttatataggaagatctgtttccggatctccgcaaacgtggttcataccctagttcatctgaatgtgtacaacatacatagatattgcaatagaatacggagtatacagagttgtgtctatttccggctccgaaggaagatggaagagaggtgtcgaatgtactgtcatcaatgtggttccacctgcacaacgggttattattcgtgcagtttttattattatattgcatattccgttccccccagagatctggaccccagcttgatatgtgatccatgttctagccctttaatattgagctggaacagcgaagacacattgcagccattgcagccattgcagccatgcctgcatttcacactctttgagcatgccgtaaaatattaaacctatttttatgtcattagcagattgaatgaacccaaaaaaattccccgatgtcagaaagatacttggggccgatcccttgatgcggtcggacaagctgcaagcatcattgcttcggcacgcgcgtcgatcactactttggtatgttgggattatcaactccgcctcccccttctaaggcatgtggacagtcgatcctggacatcccttgtaattattctctcagcctctcgccttgtgcaggacccattggtgaactatcgatatctcctagtcgggcagtttgaacgagtctgaaatgatcaaaagtcgccaatctccttgtatcggggttgatggcctttttactctttgtatcccgataacctcttccataaacacaacattctttccaaggttcaagagaatgtcgcggtggggaggaagaggggatatttgacccctcctaccgttgttccaagtcgtacaacatacgatgcacaatgccctgtggccatgtcctgtggtacatcagtccggtcgtcgattgaatgtcgatcagggatacaaaattgatgcgttcatctgcatgttgtccgaaccacccccaggtaccggtccaggtaccggcccaggtaccgtatacatgcacagttgatgccgtgtatgggattcgggagccgaactagacctatctccttggaatggttcaaagaatgtgcccgatatgccgtcctgatttgaggaactggagatacaggtgtatgctgtttacttcggtaagactacactggaagataaacccacggtccatgtttccagaaaacacctgggcacgtacaaaagtacttcgctttgttggcgggattcccgattataggttattctggacgaatctggagtacggagtactttgacactatatatcttgcccaatgttagttccggccgaggtaggtgggtttttggagtggaggtaggtgacgagaccaccgacgcggcaaaaaacgcgtcgttggagtgctccaattaacgaaagacgtcaaaagaacagtacaacatacaacatagagagcgagagagtgggaaaacaaggacagaagcagatcggggaggccgtttttgggaaaggcaaagtcaatttcaaaattacggtattgttctgtacggatcggaaaaggaaactaaagttaattatagcatcagactatcaaggcaccaatatgtactccgtagtacatgcccaactctcaaggctagcaaatatagattgctatatataattgagttggcgatatctgcgcctgaccatccatgtgtgtctaccaagtatgtatttcgagtatatagtctacgggacaagcttcagtctaattgttgttccatatatcagccgcaaaatagccagatatggaggttatacccgtaggatgttgagtagaagtaagcaggatggatctcaagagtgtatatccaaatagacgccaaggaagtagatcaagaagaagattaagaacatctgcatccatctcttttccgtcaaaatattcttatcgctccttgatttccgtttccggactgagggatccacgaccattgagaacttccaagtatcaaggagaaaaaagggaaaaaaatttgaaaagagaggtttggataaccgatcgcattcaatcgttttggtctattattttacttcctaaagcgtgaaggcaagagaaatcgagaggaggaaaaaaagataacacggcaaaaagaaacttgaacgtggacaaccctgtcttttcccccccccggtctaaacttccattcgaatttcgaatttcatccttcctctgattacaactctccttccctttttttcctcctcaatttctcttccctcttccctctttcaatcccccttcgctcttttcctccgttctctcgttttctcgtgttatagggaacctagaccttttgacctgggactttcccacccagttccttccagatttgagagatcatggctcctcctccacgtctgcgcatcctgtccggtgagttcaacttccgcctaaatcttaacgtctgggatatcacaaaaagatggttcgtcgtctaacgaaagtctgtgtagtcggtggcaatgcgatctcagcctttctctcatggcgacttcaggcgacagcctcctgcgacgttacgctggtctggaaatccggatttgatgccgtgtctcaatacggtgtctcgttcaagtatgtatctaggttgctgtgtcacagccagatggctaactccctccgcagatcaaaagcattcggcaacgaacgattcaaaccccgacatggtgagatttcgatatcaacactcggcctaagccctagccagagcccccggctgacttgtcccggtttctagttgttcgtgctcccgaagacgcctcatcccgtgaaaatgcctatgactatgtcatcctctgcgtgaaagccttgccggacgtctacgaccttgcctccgtcattgaatccgtcgtcactccccagcacacctgtattttggtgaatacgacaaataccctcggcattgaagcccatctcgaacaaagataccctaccaatgtcatcctttctctcgtttccaatgtggagatctcccagacgggccccagcgagttcgaacatctaagctcgagtgagatttacgtgggcgcaaccaacaaatcttcctccatcccgacatcagtccagaacgacatggcggcggcattggcaatgactttgaactccggtcaggtcgactgcaaggtttccgataatatcagacaggagcagttcgaccgaatgatagggtgagttcctttcgatccgctcgaatccaaactttgcatgctaaacgtctcccagcccgatcgcgttccatcccgcaagtgttttgttcgacaccccaaaccatacacaactcctcgaaaaaaccggtgttcgtccactgataatgggcttgatcgacgagatgatggagctggcctctgcgcacggttgctcattccccagcgatttcccggataagacggtccaaaaaatgattgcaatggaacccccgaccacaatgtactcagatttccagggccgacgccccatggaggttgagactttcctagggtcaccaatcaagttggcaatcgagtccaatgttcgcgttccccggattgaaacaatgtacgcaatgctacatcacatcaatatcgcaaaccagaacaagtcccggcaagagtcaccccctgcatcggtcatgggtcagccgcctccccgattgtcttccgcacccccacagcagcggcctatgatgaatggtggcccgccatctatgcggggaagtcgaacaccctcaagcatgagcatggtcccgccacaaagacgaggcccaccccctggtatgatgccaaggggcccaggcggaccgatgccgatgccaccctccaaccgagttcagcgcgacccatcattggagggacttgaggaattcagccatttggttgtctacgacgagcagggcgaaccgagtataccgcatcagaatggaaatgggtaccccgaaccagcacctggccctgcttcagagttgacattgagggagagagagctggctcttcgccaacgtgagctacagctgcgtgaacaggaaatgaacatgcgccgaggtcctccgggcccaggacgtcgtggaccggctccctcccgccctgccacggccttcgatgaagaagatgaggattactttgacccgatggataccatggcgattcctcacatcgaccccgacagtgtcgacatgatgagcatgacttcacgccgagggcgcaagggccccagccacagccagttgcgtaaaaacccagaatttggtgtaagcgctgctccttctggaggcagccgcccttcctcatcagccttcaaccgctactttggcagaaaacgcacgagtgaccgtgtgatgcaagaaatcccgggtctccatgattcacttatggacaaccccatgatgagctactcctccaacagatatggagccgttgaccgaaaccagatgcacgcggattctcgagccaattctttaacggctagccacatgggcgactacccacctcgaccttttccacagagccggcgaaacagccagactcctatgactccattcggtggacccccgggaccccctggcccaggagggccccggatgggtcgccctccaatgcaaggtcttggcccctctggtggacctaacaatggccagccatcacctcctggtaacatgcgtacgccggtgccgcgctatcctcagggacaaggaaacgcggcagggccgcagcaagttgagcaacactatggggtgagcaacgcgttccccgctaagggccttcctaaaaaccagaatctgaccggaagtgcgagcgccagcgcggggagtggtgacagtggagcaagtgcaaatattgattccgaaccctcatctcacagtagtcaggtcagcctcggcggccagggggtcgcggcgcccgttcgctaaaaaaaatcctttgaaaaaaaatcccgcttttctcaacagctgaccggcgttccatgattgaattcccttttcggcattgcatttttcctcggcttagacaatcatcgtccgccgaaattggtcatgtttggacctttttgcatcatggtgtcattgtgctgggactttattcttcggtcccgtgctattgaagcactggttaatactctgctgttcgcttctttacatatacatgagggacataggggtattcgttgctcatcttttcattttttttttgtttcggagtgtggttgggataacgaggtgcgcgtgcgagttttgtctttttttgtgtgattttgctctgcatcgatactcatcctgtttcgcggcattatcgatttttaatgaggccactacgcgagcctagactgggacatccttatccttgctgtttctcttcctcctacctccttttttcatctttacagcatgtcgatatagcgtcgtcgttggctcccctgcccaccttttcatctctctgcatgactgtatactatcagctggcgcattccgtttcctcccatctagactcgtatacgcctattgtctccattttgtctgttcatcatcattcgctcccccgggtatttccttcatttgccgtgtctttttccttgtctctcattcggcttggcttgatgcaaatggcctcatctttgattttgtggttcggtctggtcttggcgcttccaaaagagcggggattgaatttattcggttcattgagttgtgtcgtgatctgcttatggggttcgcgctttgctgagaaaattaatgaagggtgcactgcagtgttccgtttcgctgcatattttgaacagcactttattgttccaaggagcacacaaattgatagaccttaccgttataccgttgaggttgttacagcttattaccatccaagtacgtactattttaatgaatgaacaggagatattcgaatgctgtataaaatgaagtatatctgtatcgacacgtgattgcctgatagtaaataatcgataaccaacacaacctcaaaacaaaatccaaccttcacgcgagcaagaccatacccagaaccatatctcccacttgagccagtttccaaattataaacaaaatgccaccccctccaatccactgccgccaagaatctaacaccacctactcccgcccctctatcctcccagggaacggcaactacaacacaacagcaacccacacattcaacgcaaacccaaacactatatacacccccaattacaactacaacgcctcaaccccttctatgtccgctgctaaatcgcggcaatatgctcacctccattcccagctcgcacagctcaacgccaacctcgccgacacggagaacctactccgcatgaccgccgtgcaggcaggggacatgcgcttcctaggcgggtattctgcggcgctttttatggcgtctgcgaaaatcctgggagaggaaggggtcaagggaaatgcggacaaggagaagaaggctggttccgaagaggggggaatcaagagggaggagagtgatgaggattgaattgatggatcattatgatttggtattgatttgatatgattatggtgagtcggattgatcgtagttgtgatgcttcatgggctgtcggtaataatttccatgacttggtgtgctaacatatgtccaatgttcaacccaacagcagagatatgactccctttcttcttatgctctctctatccaaatgaggtgttttcttactccacaacgaattgaccaccgagaatgatcgctggctcatcgatgttatggtgttcataactatttccagtcatgttagctgtgctccatatactacggcaggggggtgatttatctctgcctaaaggccgagccagccttacctgagtgtgcctacaccaccagcctcgagaatgagtgttgtctccgtcaacggctttccagtccagcgcatggcaaaagcacgcagaatatggccgtgcgcgacaacaagaacatcgcccttgagattatctgggttctcgaagcagggacgctggtatttgttcttgatttcatcgatcagagcgtcaaggcggcgaatgacatcctcaggggatctgccaggagggaaatggatgttagcatggaaagactacacccgaacaatgttcaacgcatagcttggaagcaagacctagaatcagaggacaacgaagaaaataatcacttactctccaccgggacacccatcggtccaaatattccacggcccctcgcctttttcaactcgcagctcacggatctgcttactcgtcaacccctcatagtccccgtaatcccactctctcaccgcctccgtaacttcaacctcagcctcggtccggattgcctccttgttttcgggcttcccttgttcaccccaaggcattcgtccccggcagccaagctcgaggagctctagggtacgctgggcgcgggcgcggggggagacaaagctagaacggctttgttagttgcctttggagtggaatagtggtcatcggtgtcggcgaattgtttcttacacatgagcgagcttcctgggaacaactagtctgtcgtttccgacgagggctttgcctgttgcttgaatgcgcttctctccattggctgtcaatggtagatcggtgacaccggtgtgtcgaccattaagcgaccattcagtctcgccgtggcggataataaagcatcggggagccattatatattatttgaaatggatctagtgaaaaggaaagaagacggaatgaaaagtgaaatccggcacaggttcaggtctgggtctctttgcgtcatgggtggaccccgataacaggcttatcaccttttctacctccaacctcggaagattgtccatgtgcaactattcggctttcagtatattaaacattagattatcttttgatctatccctagcccagcaaggatatcaacatatcactgacaagatacctcaagactgtggatttcttccgtgagatgggtctacactttgtagtacttccagtcttgatctcttcgaccatcgaatgccgtgaacacttcttatccctgaacaatttcaccttacagctccgatcgatattgacgttgatgagagcctccgcaactccattctcgaggttggtgcggcagcccgaggacccctgtcccgcgtagctgactgcagtgccaacgcagtgcttgttgtggaataggtcaaaggtccagttgtatttttgggcttggagttcttcgggaggatgtgaggtagggtggccagctatggttgctgggaggaggagagttagggcaagaagggattgttggatcagcttcattttggtttgatgggttgattgctttttctttctttctttttcaatgggagattgagctagatatagttccttctcagcattgtgtagtgatgactgccgtcctaggtcttaccgcgggttgacgcgcacatgcagttcgtactatgggaatacacctgatctacctatcaatttgtcttacaggatattttgcatacattcaatttctctatctgcaacttggccaaatgctagcctctgtcgcttgttataacccatgtcgatcatagccttggaacagtataaaccactcagccctctctctgaccttcgatccaatgcttctagagagggagtccaccgcctttctctccgccttgtttacactctttcaagtgagccgagttgtccaatattctgccaggcaaatatccatgccaccatgtcttgcttccacacaatattctttgatacaccatcattcaatgaaaccgtggacagcaaattccttgacccaaacgagcccttgggggacccatccagcccccgagagagcagttcactgaaactgtcggccatatttggtcatctaaaacgttaatatggaacgccgactcacctctagaaatgtgagcctggactgggttgagcgaggtgatcaagccggggatattgtctcagtacatctcattcaaaacacatatgcccggctgaaagcccagtatgcagaaaagttgcgccagaattgggttgaacaacttgagtcacccaaccaagcccttgagcagctgtctctcgctgcgtgcctaattgaactgtggaggagcatgtacggcgctataccaacaacagaacaagagcagctattggaaaacacagcgccgttcccaggattcgtggacctggcttgtgggaatggtatccttgtatacgtgcttctcatggaaggatacaatggcttaggctttgacgcttgccgtcggaagtcctgggaaacattcccatcagagatacaggaatgtctggaagagagaatcttcattcctcggccttttggggatgtactggacttggaacaaattggagcggcgatacacaccggcgatttcccggataatacattcatcatctccgaccacgcagatgagctcacagtatggacccctttaatggccgccctatcaaatccctcatcgccattgccattttttgtggttccatgctgttctcgttcacttgctggttcgtcgtatcgatatcccccgccaaaggagggtggtccaatacaaaagagtgcgaatggaaaccctgtcgcaaggaaagtcgatgataagatcgaacagaatctacagcctgcatctggtgatttgagggcacttcgggcaatcaagatcgaagaaaaggccgagagcgggtttctgaattcgatgattggatctctcgctgcaaaaacaatgagtcttgccgaggaaattggtttcgatgttgagaagacatggctacgcactccgggagcgattaacatggcgctgattggaggtcgacagcaggtcacaagcgagtggctaaagaacccggggtctatagattctctaacgaaaagaaaccaagaagatgctgttctgaagaagattatggaagtggttgagcgtgagtgctcccgagatggtggcattcgggtagctgctaagctctgggttgaacggacgaagagtcttcaccggggacaggggacagtgcaccaagcttaataagatattcaaatgaagatgccaatagcattcacagatgactgctacctacctatcctacctttcgtgattcaagtacatttttggtaaactctctaatagcagaaaacgagcccaatcctcctggacgatatcctgaaggcaagagcacaaagaatgtagagcacagcagcaacgccctaaagctagcgttccaagtccagaatggccgaagtattgataacgaaaagaaaccgtgtcactaaccatcttcagagaacctcgaagctaacaactgattcttcataaggctgcctcggtggttaacgagagaaggataactccatatagtaaataaccccgggacgaagcgcatgggacaaggtatattaatagcttgccaaggaagatcagcaagtacttggctccaacaggagggcccctttcaaggaaaatgatagggacaaatggcattaatatgtcatcatatatgctctagatctattcacacctaaacaaaacataaacatatagcgaggggaatagagaaaggagtgtgctaatgtacaataatgttacagacctcttcaactccgttgctaaatgttagttgaagatccaaatcacaacgcctaggctcccattataacgcaatcaaaccgtcaagacatacttgaatcactacgtatcaggcatcagacttcatatgatcttcggggcaagcggcctcttttccactgctgccactttccgcacgagcgttgttagaggccgtggctgatgcttgcatagcagccttggagttggcaggtgtcgtttttgatgcagcttgagctgcaaccgcagccgcattctccttgaggcgtctcaggcgttcaggtcggccctcccctgggagacttccccataccggttcgattgaatcggcacgccagttagtccgattcccaccgagcgcgctgcgcttcggggagagcggggagaaggtggagcctcccacgccggattcaccccacatgcggacgcgttgaagcttgcgcagtttggagagaccgtagacacagacgacaccagtcagagcaaagcagaacacggagacagccccaaaaccgaaatccgattcttcaatgaaattcttcaagttcatgccgtagagagcggagaataatgttcctgttgcgaggccgagtgttccaatgctgaatttgagatccatgagcatgagcgagttgcggttggcatcaaggatagccttgactctgagttgtgttagaggtgctttgcatatcatgaacgattcaacttacacttcttccgtattgcgaatactcgtcaccaagtttccactggcctgaacaatctcatcgcacactttgtggtatgactccagaagcatttccacttcttggtggtcatcctcttctcgctctttgccgaccgatctctcagataggtacattgctgctaaatcatcatccgcctccagcaaatcatcaatggcatctcgtaccaggcgagctttctgctcaaatgtacccagtttcttggagtagatcaagagatgccggagcttatctcggtcaatgtcctcctcgagtgcacgaagaacccgcacaacaggatctctcactccattgaactcctcttctaggccactcgtgacactaatgaggacggcttccagcgcgcgaaactcgtacggtagcggttgactggcaccctggggttgcctttggcggagctttccttctaaatcgtagatgaacagcgattgcatgtatgagtctgttgatccatacgcgtcaaaaacgagtacccggtccgctttgatgaggacgcgcagatgcaatagattgatgagaattgctctaggtcgtaccaggatatgagggagagtcgacgaatcaatcttacgtagatctcggggaagaaggccatactgaatcgtgatgcaccggttagcaaatgtcaaactcagactcgagacctttttaccaaccttggcaatcagctcctgcttccggaactctccgttaacgagtgtaacgtctccattgatatcaaactccgtgcatcgaattcgcagttcatttgacgccttagctgatatgctgcggccaatattaaacatcccctccgttccctcatccataagcccagggccagccgggccttgatccttgtggtcggaagctttatgccgcttgaggccaaaaagccgtcggagaaagggtcggcttttggttgatgcatgacgcgagaatttcagctgcgtaggcaccaatggcggcggcattgttgctctagtggaatttggtcttccatactgagtgctgcatagtgtggtatcaagtgttgcggggctatgagtattgagacgcgtccagctcgagaattgtcctgtcgagaagcctttatcgcggctggcaaggcgcttcggataagcgcatgctgatggtacggctgagaacccagactgcgatcgtagaaagcgcaataaagaggcagaaggcgcagacagcctcggagacagcatgtctctgaattatcgaccgagctgtatcgcaagttctcccgatcagatcagatacgcatttttttcgtttcccggaacaattttgacccgagaatcagaactataactggaaaacactattcctcatatcttgtactatgagaattagaatattgattctatctacgtaccaaattactatcaattggtcaagtcaaattacttccttctcggctcagtgcccaatcaaccatcacccttctccctactgcattgattcaagtttgcctcaatcgcctcatagttgttgggaatttggagttggtttggctgactgatatgaggccaataggatccaaaagacggaagatagagcacagaatttcaacgggcaaagacccaagagagggaggattattacggtggtgtaacctaaactccactggccataaacatgtggaggcccccggtgtcattggactaagaaagagaatttaaaacatatacttcctcgtactgagactatctctcgccactggatctaccatgaaagctatatacaaagtgcattgcccctcttttgttaacacttgaagccaaacttttaggcaaaacgctggaccaggaagcagaatgctcaatgctcgcaagaatgcgcaaaagccaattgtatctcgaaatacttgaacagtcacgaatactaactgctcaccaatcgtcgtcgttgtctttctcgtcatctaccaacatagttagcatatagatccgcctttccgtgttgggattgacttaccacttccgctgactctctgttttcgcttgttgagagcatcttgcaatgcgccggccaaaccaccttgaggggcgcctcctgcgttggagcttgtagctgatgactcgttagcaccaccgggtaccaaagctttacttcgatctttcttttccgtatccttgaccttgcgcaagcctgcgcctccgtggccgccagaagctctgatggacgccagcagatcgctgtgtccaccggcgggctttggcaagggtggtgcagcaccacctccaggcgccccaggaggtggaggcggcggcggtggtccacctggtgcccccaaaacaggcgccggaggagggggagggggcggggnnnnnnnnnnnnnnnnnnnnnnnnnnnnnnnnnnnnnnnnnnnnnnnnnnnnnnnnnnnnnnnnnnnnnnnnnnnnnnnnnnnnnnnnnnnnnnnnnnnnnnnnnnnnnnnnnnnnnnnnnnnnnnnnnnnnnnnnnnnnnnnnnnnnnnnnnnnnnnnnnnnnnnnnnnnnnnnnnnngtcggggtgggggagggggagctgccgcaggagaagacggtgcagctggcacgggtcgaggcgctggggggggtggaagtgggggtgaaatggggcctctggcgggtggaggaggaggcccagttgtaatgctcatgggcggcactttggggggcagttggggtggtgctgctgggctcgccgtgcgaggcggcggaggaggaggtccacctggtgcagggctacggctggggggtgccggtggcacagacaccttgcgatcaccagagaaaggcggtggtaccccaaatcgagattgactcgattgaatatattgactatcgtccatcggtgtcttcggtggtcttggcggcggcggaggcccagcattgacgttcgaagttgcgcgtggacgccgcggaggcacagggccagcgggctcagcgaattttcctgcgtctgcaaatggaggcggcgcgttgaatcttcgcgcaggcggagatggctcacgggggagggaaaccggttcctctggtgcttcagaacgtgttttccgtgatgggggcggcggcggtggtccccttctgcttgtcgagctagaacccgtgtcttgaggactgatcgtggctactttcggagcgggaggtgcagaaggtggcggtggaggagcagcctttggtttattctgatcctcagcagggacagactcagccgctgccgcctgcttctggtcaatccaagctttgatgaattcggaattctcagcgatttggtcttcggtaattcccatccccttaagctcatccagcaaacctttccaagaggggtcactcgtatcaaatggcaaatccggcttagctgatggtgtgattggggacagtgtcagaggtggaggagcaatctgtattgaaggcgcaggtgctgtcggcggtggtgcactgggagttgggctcgaacgatgtaacaagctgccaaacaaagaccgtcctactttcccattggtaacaggagcaggtccctggcctcgagtagatgcgaaaggagtcttagtggtctctttacttgcatgtttctcgcgctcatgcaccttcttaataaaggtcttggcctccttctcgtcgacaaaggacaggccggcgggacaggcttcgagctcgaatgtatgaaagaaggttcggtcctggttgtaagcgaagttgtcatagatctcctgatcccagatcacgcccctgccagtgggctgcatgcaacaacgcattgtcagcacatctactcttatctccaacagcagtatggaccgcttaccgagacatcgactattttaagccaaaaagtccttcccacgaggtcattgcagaggacaacagccccttgaattccggtatatgtccatttctgtccatccgggtaggcgacgtagagtcgcgcgacagctacggcgaggatcttgttggcgggtttggggacattccgcttaacagtttccttgtcggcatcactgaggatggagggcatggtgagtcgagatggtcccccactaaatggagaggggaaaggtgatagttcgaagggtggttacgtgagtagagcacacatccatggatccatggattgcagccgggcgggtatcttcgaatgatggaatagcgccaacacaccgacggacacggtagtgggggagggtacagggtttccttataatcgattgattagatccgaaggccggggtgttagagaggagccgaccggcggttgccttagagagttggagaggatgaaccggaggtgagaaggcgtaggcggggcgcaatacaccggagtgacctggccctaccgcaacaccgccataccggcacgtggtacttctcttgtactattcaaagtgtggctacactatataattgtttgatagtctttctatttgatattttgatgtttcaaaaatacaaattgatagaacattgctgacatgatcttcgtgagtgacgaggatagcgggatgcggtttagcgtgctcgtttcaatggtgttctatgtcatacaagaaggaaccattttaaagatgagctagttaactaagtgaatatgcggtgtgtcaatatggctgaccagaaataggatgtatgcagcatattaaatgtatagaagacctcgggaatattctttggactagcaatacttatctatcttgttttgactatatatatccagtatcggctatgtttgttgcaatgaggtttatattgcatttcaatcaaatcatagctaccagtgcatgccccctaagttatccccggtacccactaaacgtagccatcaaatcaaatcatattgatatgttgttcttttcccctcatacgtgtctaggcaacttctatcatgctatttgttgcaattcgaccaccgacgtcatccctcctgagatctataaaatagacatccaaccgccgttcaacacttgcttcctcgactcaccatcaccaagttacaagatttatttgttctatttaccggcgaacaagagctagtattagctagcgactactcaacaaggagctcttctatatctccaaaatgccggtcatccccgagtcgtcagacttcccatctgctcccgaaaagggaagcaatgaggccgagaagaaaccagagaaacaaacccagaaagcgaccgcggcggacttcttgtcaaagggacctcagattccagacagtaagttgggaaccagacctatataggctcgcgactgacactttgtagatatgcctcccaaggcttcgaaagaggagctcgaggcacgcgcgaaggaactgaacgagtcatccaactaagagacccttggtcaaaatttttattatctatctgtacttcattcagtagcagtttctggcattccaggcaacttgtccttgtcgagtgtaactatctatagcgggggtcatgacccaaaactagctccagcaccaacaaacgaagagtagctgcctgagacttatgaaacaaaccaaatcaccaaaaaaatatactattttttatttttcttgtcctcaaaaaggctgcgtatacttccaagcaaccttggaaggacctgaggtcgttcatcaattcattacgtcatacatcatagcaccaggacacgtgatcgcgcgacatctcattgaccagaaccctcattcctcaacgcgttaggaagtgctcccaatgcctccagaacggtccaatgtgccggtgaagctgtctctaccactggtaagtatcctatcaactcggcccaggcttcccgctaaccccccattaagcaataccagcaagagctcttcaccgaactacgcgccgaagatgagctagtcattcttgcacgaggcctggggcttctacacctgatatcaaacctcctccacttttacgatgcggcgggaaacaacctggtcctggtggtgggtgcagatgaacgcgagaatgagtggatcggagagggtatgtggattggtttacatcccaggtcggatgctggggttggaagctgatggatcccgaactcagcattggcggagcattatgctaccagcaagtcccccctcggcagggggttaaaagtgatcaataccgagaaagctacggtgccaatgcggtgggtttctcggttctaccattgtcaattacggcgtattgacaaactaccagagaaggaatatatggcgaaggaggtattttgagtgtgacatccagaatattggttgtagacttgttgtccagtatgtatgctagtataatggctcaaatcactagctgatctttttagaacttcttgatcccgagaaagtcaccgggatggtcattttgcatgctgacaaggttttggcgacatctcttgaagcattcatcatcagggtttaccgacagtcgaacaagagtggcttcttgaaagcattctcggactcaccggagccattcactacaggctttgccccgttggctaacatgctgcggaaccttttcctacgcaaggcctccttgtggcctagattccacgtttctgttgctgagtccctagaaggaaatcgcaaggcagaagtgattgagttggaagttcccatgagcgacaaaatgagggaaattcagaatgctgtcctggaatgcgtagagatcagtattactgagctcaggaagagtaacaccgggctggatatggaagagtggacgttagacagtgctttgcacagaaatttcgatatgataatcagacgtcaactagacccaatctggcatcgtgtgagcttcaggacaaaacagatcgttgccgacctgacaagcctacgagcagtccttcagtgtgtctctcatgcgtctttccctttctctatactaacagctctgcagtgctttgctcagctatgatgcggtatcttttgtgcagtaccttgatactattgtgtctgcgcatgctccgcctcccggctccaacagacataattactctccgtggcttttccttgatgctgcccatgttcttttccagacggcgaaatcgcgagtctaccaaggcaaattgaacaacgaactgactcgcctttcatcttcaactacattttcttctgagttgaacccagttctagaggaactcccaaagtggagtgtcctgtcagaggtccttgcagaaatcgaacacgatgcttacctccatcctgcgagaatgcatcaatcaaatagcaccatattgattatgtgtagtgatcagcgaatatgcacccagcttcgcgagtacattgccaccatgcatgcccaaattgcccaagggtccgagcccaaagaacatgatgatccgagtgatgacaagccttctgcagagcttatgatgcggcgtcggctgcgagactatctcaattggaagaggtctctttcaaatgtcaacaagaatttgtctcagtcaggcgaggacgataggtccggaaactccgagtcatcagcggcccagagtgcgcatcaaggacggcctcccccaaacaaacgtcgtcgagtacgtggcggcggtgcagttacctcggctgcaggtcgtgtgccaaatagcagtgtccaaaccgaagtcgaattgcccggtcaggtcatcagcttactaagtgagattcagcccaccggcgtggaagaaacgcagaaagaggaggttattatcgatgagttggaggatatggaagatttctacgaattgtatgatatggacgatctggtcatgatacacccttacgacggtgacatggatgagcatatactcgaggaagtgcgtccgcgatacattatcatgtacgaacccgatcccgcattcattcgaagggttgaggtatatcgcagctcccattcagggcgaagtgtgaaggtctacttcatgtattatggtggttctgtcgaggaacagcggtatctgagtgctgtccgacgagagaaagactcattcacaaagctgatcaaagagaagggggtaagctaccctgctgcatccttcacactgttaactaacctgatcttcagaacatggcagtcaccttgacgcatgacaaaaaggctgaagacccccaggagcaattcctccggaccgtcaacactcgtattgccggaggaggacgactggcggctacagcatcccctcctcgggttgtagttgatgtgcgggaattccgaagtgccctaccatctctgttacatgggaacaacatggtcgtaattccctgccagctcaccgtgggtgactacattctcactccagacatttgtatcgaaaggaaatcgatccgtgatctcataagctctctcaagaatggccgtctctacaaccaggccgagacaatgctccagtattacaagagcccattactattgattgagttcgatcaaaacaaatctttcacgtttgatgcgttcgcctccgttccaacaggtcccacgtttatgacagattacggtttctcatcttccggcactgcaaccaccactagcagcagctcgcttgccaacccgtctaacccaaagtccgctcagcatctaatagtgctccttactctcgccttcccacgcctgaagatcatctggtcttcgtccccttaccagacagccgagatttttgcagagctcaaaaagaacgcccaggagccagatccactccgcgcagttcagctaggcctcgatattgatatatctcattcgcttggctctgctgacgtcatggctgccactgggattgagcaccgtaccttcaatgttcttccacaagacatgctgcgagctgtgccgggtgttacgccccaagctttagagcggctgataatcgaaacggacaatattagtgatatcgccaacatggatgtcgagcagctggatccactggttggcaaagaagctgcacgtaaaatcgttgctttcttccagagaagcgtatttgattaatggaggattcattcttaatcaaatatgactttgatgcaaattaaataagttcatcaaaaaagccctgtatgtcagcaaatgcggtaactaatgtgtaacaatgtaacaaatacaactacatcatcccatcacatcttcatattttgcccaaatcagccagaaaaaaacaagaaaaacagcaaacagccgagacatccgagttctggactcttacggagtacagagtaatcaatttgaacctggtctactccgtaccccgtcagacttcttgtccgtcttggcgacgatcgtgcagatcagctaaaaacagaacagcccccagtcaacaacagccgaagcaaggacccctgagaaagagtggggatgtggatgagtccttttaaggtcagaaatattatggactcctgacgccttcaacttatcaccatgcatctcaagactgtgttgactccgatcgctttggctgctgttgtcggtgctactaggagtatacgcgatgttgagccgtgtgctcaggttagcaagtttgtggaagaggccaaccgaaaccagagtacgtcatgagctcgaaattatcaaaattatcaaaattatcacttggttgataactaacggtcgcagcaaatgcccttgtccctcatgatttggcacaccaatgtctgctatctatgccctttgactcgaaccgcgccgttgatttcttgaatcaggttcgaaagatcctcgagtttcagtcgactatcgatattttgaagggtaagtgatatcaattcaaatgagaattctttaacctggctaacctgtatctgctagatcctccatcgggatataccatgccctccacggatattatggggggaatcgatataatcatcgacaaggccaagagcaatagctataccagccaatttgagatggacttggaaatcaaccaccttatcaaaacggcccatgacggtcacctggccttccagctatgctcacagtcaatcttcacatatcaaatcgatatgcctctagtgtcaatttcaacagatgggctcgcacttcctcaagtgtacgtgttaggtatgttcagaccggtatatatatcaaaaatttgaactaacatgacaggcgatgcaaaactgcggaaggtcgacccggacgccgtctcgcctctggtgtcaatcaacggcactgatgtggctacgtaccttgaatcatatgccaatgatcaaaatctccaggattgtgatgcacagtaggtgtccttctacagccacgacattgaatcacatttaactgtcgcaggtacaatcgagtgttccccgcgccagcccgtagtgtcaccaacactcctactagtgtggatggaatctgggcttccattggagactggactgatggcgctcagctgtccctcaagtttggtaatggcactgaaaagattatccagaaaacagccacaccgagcgaaaagttcttttcttacgaaaatggcacacacctctacgacatagagtgtcttcctcgagacttgtctacagcttcgagcagcccatctggcgctgagacagcctcctctgagataccgggatttcccagcaccacctggcgtaattcagctaattcgattgctggatactactctgaattatcagagctggagaacacagcaatcatatttctgcctacgttctcatctagcgcatcagaggtcgctaagattgcggttgacttcttgcaaaacagcaccgaatctggaaagaagaacgtattgattgacctttcatctaacccgggtggatacatgtctattggcatcgacctgtctcgtatcttcttccccaatgctgctccatacacagcgacgcggttcagagcacacgatgcagctaagtacctcacaaaggcatactcgcgcgacaacagcacggacacaagcaatgtttttgcgtatcggcagatggttccacctgaccagagcacggacttcagctcgtgggaagatctctatgggccgcacgaaatcctgggaagctctgcttctagcctattagccaacttcaactacacctccacctctacagaaaactttcccattagcggctacgggcctgttccattgaacccaagcaaagcacccttctcggcggataacatcgttattgtaagtgatcgtttctcacaagaatacagaaaaaagagaacaaactaacacaaactcaaatgacagatcacagacggcgactgtgtctcgacttgcgcgttctttgtcaagctgatgaaacgccagggcgtccgcactatcacctttggcggccgtccacagaatgcacccatgcagggtgtcggtggcgtcaagggcggccagtcactcggggtcaactatatcaacggatatatcgagcaagcgaacgggctgattgaagactcagtcaacagtggatcgccactgctgacatctgccgagtggaaggcattcaatgagtccaagccgagcacgacggcatcgctccaatggagtggcaacctcaatctgcgaaatgagtatgacccggaagatagtcagacaccgctgcagtttgtttatgaggctgctgaatgtcggctgttctatacgctggataattacttgcaaagggagaccgtttggcaagctgcggcgaaggctatgtttgggagtgggcagtgtgtagagggatcgaccaagggaaagggtagtctggattcttgatctattgacattctagcagagagacatacatatcatacatagaaattttgtaaaaagatatacatacctggcctgtactccgtacatttgctgaaattgcccaggtgactgtacggagtaggagaatcacaactacgtgcagcacattggagaaatactatttaccaacctaaaccctcaactactttaggcatagcgcgacttggctgccattcgcaccgccgaattatggcagatctgttccaggtagtcacgtgacgcccctgacgttatcaatcacatctacctacatatgtccgtcaacgtccatctgcacgcgtccttacatcagcgctgcctgagagcttgacttctaaggttaacgatctgaatatcttctcgacaccatatctacaacccaaagcttgacagcccagcccatataccaacgtcacaatggatagaccacaaaaaacggaaggcacgatgggagaggtgcgaacgtcgagtcttacccaggtccacaatcttctggccccttttacctacagagacatgatctaatatacctcgattcgattaatcgtaggcaaacctgtcaatcggttctaacctcgattctacctctgcgtccagaggctcagagaccactacaactacgcccccatcccaatcatcgtaccagccgtttcttggagagtcgaacgatcttgtcgtgccccctaacgcaagaataattcgcccgcgctccctgaatgatatctacgacgcaattgaagacctaaaggctgaattagacacacataccgtcgagacacataccccccgaccatcacaatttatctgggcttatcaaattccgcaaggcctctttacccagatagaaacagaccttgaactctttcccggtgttcgaaccacgatcgcacacaacgatttcgctgtattattgaaaatcatgccgggtcgtcagcgtgaacgaatcactgggaatttccgtgttatcgttatgggccacctcaatgctatgggcttgtccttgcagaacggagatttcactgaccaaggcgccgaaataactcgcggatttctacaaagtaaggagcccgattgggcattcggtccgtacgacgcacgtatcaattcagcggcagacgaatatcctgccaccgaatatccctccctcattcttgaaactggcttttctgaatccttgggccaactccaactggatgcccattggtggtatagaaataccacccaagaaaccaaaatcgtcgtgttaatcgatgtggcaagcgacaatccgtaccgcgtcaattttgaagtttggactgaggttcctaaccagtcccatgcccctgtaaccagaaattgtccggccgaagttgttcaatgcacccagagagcgacattgcagaacggggtggtcacaggtggccctttgattcttagtttccccactcttatgcggcgagcgccgcgggctggcgagcacgacattgttctaggggctgctgatttggcgatcatcggtgcccgaccacgccctgccccttaattttccggcatctagcgaaggtgccgaacctcatcgcagcaacgacggggcggccaacaagacgatggtccctccactcggaacagtatctcaatttgttaacaacgagggaattacttgatgcctggtgggttgtctgatataaacataacttcttcggtccaaccatcaaatgagaggataatactccgtcgataggtagcaattggcttcgacgttgggcattgacctaaagataactacgcaaaggttcttgctatccgaatacgaataatccagggggccctggaccctgttatctcctgtaaagtcaatgctccttatataactacgtctttgttctctaaattccaagttgtgctgcccatgcaggcggctctatgtgtagtggccccatcaaaagcccctgcctgagaacccccaaagtttagttacgatagttcacttgatttgtctaattactgctttgaattggtctacaagtaaaataatcttcaaaaaatattttcaattctcgtggcccatttcatgactcttatcataaaagaacgaaaagaaaagcaagtcgaggctgaacagagtgaacacaccgcatgcaatgcaatgcaggaaaacaagcacacaggttcatgatgtgtgcatggcaatcattttattctctgtcatgatcccaagatatttgcacaaaggacaaaaatggtatcgacgatcgatccaccttggaacgccaatggagaaatacctagggtcctctgttcgatggcttcaagcccgtaaaagttatcgcagtagcgccagaatggagggttttcccatcctcatgcaagccgaggtgaggagcagcgtcgtaggccggggaggtggttcatgctcttggtccgttcgaacgaatgtatagagggaatcggatgtcgaaagtgcctcgcgtggcaagtagtcaaaggcagtttcggagcagatgagcgatggcactgtgtccacgacggcgagtaggaggagagggatttggcgaacatggagaataccgaggaggatgtatccggggtatccttgaggggcagagcatcgaactctaggggtagcaggggatgagcttagagctcgtcgacatcgatctccttctcgtcctcgctttcgcggtcctcgtcgaactcaacgttgtcgtccaagccttcaccaccgtaggtatcggtctcgttgatcttggcgtgttcggggagctcgccataagcctttagagaacgggcctcgtcggcggtgtacttcatgataacatcgcctttctcgtcctggtagtcacggagcgagaggagaatgatatcaccctggttgatccagaccttcttgcggagcttgccacggatgtgggccagacgcttctcgccgtcgaagcagagtgcctctaggcgaccattgcctagcattttcacgacctgagcgtactcctggccctcctccttgaagacaagttcacgcttctcgttgtcgttctcattcttgccgcgacgacggttcttaccgccctatacttggttgtcagcatgtgtcacacaagtgaagatcagtggtttccaaagtgaaaaaaatatttcgcgagcccacaagtcaccagcttgagggtaggtggctacccgagacggtggatgtggcgaggaaattatcaccaagaggaggggctggatattttgcgcgcttacctttcccttattcttgggcatagcggtttttcgtgaccttcacctgggtcaagtctctggggaagattttttccttagatcaacgaagatctgaagaggcctaatcgaggttgattaggggagtgagagtggaagaaagaaggaggtgggggttctgtgcactggtattcaaatcttttttattatgtaatcaggcactggctgcccagtggcgtcacagcgatttcgcccccgcttaactacggcaaatttatgccttgatgcctgatttcggggtagattttgaccgcctggtttgatttggcagaaaaggatgagtgtcaagcttggaagtttgcaagggcatttctgaggaattctctgaggtgttgcgataaaaggtgctgtctgatctgtccaagatcctgagtattcacttcatttacagctttcttgccctccgtgcgacccgtcctaagaagcagcacgagactgctttattcacgcaagctccgaagattcggcgcctgccgagtacattcacaatacatctgtgatacttctcttcgtggctcgatggtatctttttgaacctatatcccaaatcaccaattgttcctccgaagtgtccataggtcttcgccggctctgtttaatcaaccttaacgtgcaacccgacatgatatcaatgtgctacgactctcgttatatttcacagtccaagccagcatacccttacgaccaccggtaaacctcttctatcatggcgatgaaatttgtcacgtctacaaatagcttggtgcttcggtattggcccaaatgcaacacccctcctgttgccgcacgctacctgaattctcccacccatgcgatccggcccaaaattgtcgatctctgtggacatcgtgaaagaaacacactatggtggcgagtttccgtgtcacaactccagcaaagcaagcgggttgttcgctcttggtgcgcgcgcagagtgcgaatggctgtcgagcaggctttaagacagcaaggattggataagctggggaacccgcttgtttctgaggctcctttgcgaaggagaaaattgtcaggaaccatggacatctacattcagccgccatgtgtgacgcggaacttagagggggtccaaaaggatgcagatcatctaatatccttgcttctggatcatgaatcaccgaggaaatgacctattgtcgatgagctacactcagaaagcgaggcctagcaagccgtggacatcatgcgactccgtgagactcaatgtatattaccataacatcttgtatcatactactagcagtcgattgttggactgttattgtacatcattaggcgacattgcgatttatagcatttggggggaattagtttgcatctgagatttaaattatttcaattcctgatttttttcattctttatacctccaatttacaactaagctgtcgttgttggctccgaggtacagaagtaaatacagaagcgcgtatctcgctaaatgccgatctggcggaatcaacgacccaggtctaggctaagattcacttgacaaccaccacaacttttcctaaaccttcccctcttcctttttttcgctatgttggtttccttgacagttggcaaggtagacgcgggtgtcgcagtgctcctcacccaggacaatcggctcgtaagctcaaacccctggtcccttactccctaccccgaagatatcgacgacatgcaattctgcggaacatcaatagcaaacaaacacaccttactgacaaattctccgcgcagatcgaattcccctcagtcctccttcccagcaacattagctcaggcagcattgtcgatatcaccgtttcgcgcaaccacgctgccgaagcagcgagcgcatctgccttccaatctctccagaagcggattttaaatacgtacggtgtcaaggccccgtcaccccccatcttgcgcctccgaaatgcgacccagacctcgctcgttctcgagtgggacccaatcgacctagccactgcatcactgaaatcgctctccctttatcgcaatggttccaaggccggctgcataccccgcccgctagagacacgcagcacaaaaatcagtggtctggccattcactccgagtactccttccatctggtcctgcgaaccacggctggcacctaccagtcggagaagctgacgtgtcgcacacacaagatgactgacctgtccggtatcactgtcacaacgggtgtactcgatccacagcagaaggaggctctcggtgctgcattggaccgcattggaggcaagatgatcgactcggtccgtatcgataccactcacttcgtctgcacggaaggacggggcgcgcagtgggagaaggctgtagagatgaacattcctgtcgtggtgccggagtgggtggatgcttgcgagacagaggggactattgccggtgtgcgtggctactatctcaacgcagatcccaaggcccgtcaactcggcgtgatccacggctcgtcccaccagcgtactacttctactctttcgactgcgacaagtgccaaccagggaaggcccagcactcagccccaacggagccccgtgccagagcaagtacccgaagagcctcctttgactccattccctgggggtgagacgagtagccaaccgcaggcgcagaggcagacacaagaggttggatcacaacatgagaaaaacgacatcctgcccccttcacccccgcccaaagataaagccgaagatacagatgagccttatcaaaatggtcaggcagaagcggcacctattccagaggcgaagaacgaggagcctgaacccgaaactgcagaggagagcaatgaagagacagagaaagagcagacctttccacagaacaggcccgagggtgactccgagtcgacaaacctcggaggcacaaagggcaaaggcaaagagggcgagagtgacttcaacgaagttcctctctgaatagccccctgatgatttattctgctctatccttgcttcgcggtcaatctcttaacacccctaccctgcttttgtctcagttgtcgaccaacgtctacgactttatctagtacagttttactttgttgcggttagtggcgtttctcacttgagcgaccaaaccataggattcttacgaacgtattccgactgtgattcctcatttttttttctctgtttcgtgtttgctgttatatgtacagtacgcaattttcctaatgcagccttgcccattgactcgactgatccgatctgcctagatagctatttggagactacctaagtggttacattgcgtaaggacaccaagcctacacatgtggctatgttctctaaattggaaatatcatgaaacgtcataaatgagatgggcacgccagatgcaaggtaaatagtagcctgcaaagaaaaagaaatatcaaccccttttgagaaaccaaaatgcatggcagtctaaacaatatagaattcaaaacaaaaccagttcggactccgttcgaatttagttttcgttgcgaataacatcgtcaatcgcctgtgcgacgtaggcgacattcttttggctcactgtgcacaatgtcagttcgtttttatgagtatccgtgattgaggttccttacggccgctgatagatgctcggcctgacttgagcaggtaaatgtggtatttgtccttcaatgcgtagacttgcttgggggaaagaccggtgtaggaaaacatgccgttctaaaagaacaattagtacaaagtatgttacacatatggtaaaatccagatagcttacctgctggatgatgtgctcccaagtaccgggggtctgcagacggaccagttcattgtatagagccttacgcatggccttgatgcgcgagctcatgacctgcaagtcctggttccagtcggcagtgagctcatcgctggtaagaaccttcttcacgatgctgcagccaacacgcggacccatggagaactcgccgcgaatcaggtggcataggttgttcacaacgatgtcccgcagggtgactgaggcgcggttggtacagtagtggaacgcaccaacacgctgaccgtacaggccgaagttcttggagaagctctgtgccacacacatctccatgtccggcttagtgttaaagaagtagcggacggcccaagcgtcctcctcaacggaacccgaggcgaagccttggtaggccgagtcgaagaaagggaagagcttcttgcgctcgcaaaggtcagcgatggcaacccactgctccttgttggggtccaggccggtggggttgtgcgcgcaggcgtgcaaaagcacaacatcgccctcctgtgcctcggactcgagagaggacatcatgccctcaaagtcaaaggaccgggtttcagcatggtagtacgggtatttcttgatgggtacgtcggccagctcccaaatggtttcatggttagcccaggatgggtcggacagccacacgttagtgggcttcatgtggtgagcaaggaacagggcgccgagatggttggcaccagtgccagcaacggtctgcacggaaccaatgcgtgccttggcctcttcttcgccttgcttgccctcaaatccaaacatcagatcccgcgcgatccctaggaaaggcacgtcgccctcaatcgcagtatattcgtggcggaagagatcatcgtctcccaccaactccttctcagccttttgcacgacgggaaggggccatggctttccatcgtctgtccggtagacacccacgcccaagctaaccttctgcggatggggatcgactgcgtaggccccgttcagggcgaagatttcgtccggaggcaccggggagacgttaagacgggtgtcaactttggtcattgtgatgtatatacgctgcaatggcgattcccgggagcaatttctgggcaatatgtaggtcgcggcgagtataagtcagtaaagatcagaaccttgtgatcgcccgctgagtcaacccgatatcgccgtctgtctttttgccccacatagcggattccggggtcgggttgcttggaaggacgcaatttgcaatgccttcattttcgtttaattcaaagttcaaaggaagagatggccttcaatagtcttcaagttttggccatatgctgatgaacagcctgttgagataggttattgatcttatcttggaggacttacctctaaacaccagcatgaaacgtcatcggaggtctgctggcgcgcttgtaaatgcatcagaagcactgttattctcaaggggacaaatatgagtttttcttatgtagcaattcaaacggggtcgatgataagtgatgtgttgatgggaatacttgggagagtaactattgggtggagataaacgcgaaggtatgagtacttcttctacaacaacattctatttatgtttggctttacaccctcaatgtttctattgattccataatgtgggaaagccaaaacatcttttctacgatgtacttcatctgtctccggttatatcaagatatgaaatgaacaggaaatcaaccaaacacactagaagaaaaagcctgttgagctagtcagaacttgccagatttcgttcgagctattttcccaatcgatcctttgatatataaattgcagccggtgaggatagacgcttgaactcggagttatgctacgtaagtctctccgcttcgacggtgataaaatatattgacacggacattctgtgcatatctacggagtacatagttatgttgcagttagttacgtgggggtagactgaacttggtacttatgtattcaaatggttaccccgcgatctgtagttactaagtggacttcggtagcctgcttttctcttccatatcctattctttgaacaatccattggataaagtagccggtgccatttttcgttatcaacatggcctctcaaacagtagaagccggtgattctgctttgcataagtttcaggttccaactgttgtcctgccacttcacaacagcattcccccggagctgctacctcggtatgacccaatctacgtcgcatactataatgcatttaatgccgggcgactgcatacgcacgagatcccgattgaagagttccgcaagaaccctgcccgttataccatttcctatggccgagctcccggccctgatatttatcgcatcacagaacagaaatgtcctgtccatggcggtgaaatcaccatacggatatttgagccagcatcccagcttgacggacagggccagccgaagaagagagcagcctatgtcaacttccatggcggtggatgggtgtttggtggactagcttacgaccacgatttctgcaagcgagttgtccatggccttgatggggaccttgtcgcatttgacgtggattaccgactggcccccgagcataagtatcctattcctgtggatgattgttggacggctttcaaatgggtaggagtctcccgggccaagattttagatataaaccaggtgctaacgaggcaacatctagattcgctcccacaaagcgaccgagttcaatctagacccagataggttcgcagtgggcggcgtgtcagctggaggccagctttcggccgtcatcagccatctctgccgcgatgcagacatccctctgcgcttgcaagtcttgactgtgccggtgacagacttgcaccgggtttttactcccgaaggtgagtttgactacgaaggctgtccatatgaatcataccgagagatggagtttgcgccagcgctaccagcagcgcgcatggcatatttccaccgacaatttctaggagttcctcgaccggcggactctgacgaggtaagttccgacatgaacttgaactaattgaaaatgggatgctcatttgtctaggattggaagatatcgcccattctcgcaccgaacttccggaacttggcccctgcgttggtgtctacggcggaattggacccgctgcgcgatgaaggagaggcgtatgcggctaagcttcgagctgctggggtatctgtagaagtagatcgaattgcaggtgttccacatttggtcgctggactcgacggaattctggagggaggtcagcgatataacgagaaggttattgcgacgatgaagctgcggcttaagggatgataaataaataccataccaaaccggataatacacgatatgaccgaatattacgggcctcactgccgagcaacccgtttcccttcggtcctgccgataccgggaaatgccggcattgcgacttttctttaaaggagacccaatcctcgattccactctcatagaagcttcagaagcttagtgggaacctttgtatatcctctttcgtacagctacaaattcaattgtcacacaatgaattctacttcctcgcgagccgcggtgcgctctatggccaccctgacacatgcggccagagccacccccgcagctcgcagcgttctgtcgccctttgctacccggtctctgagctctaatacccggcaattcgttcagttcccccgccttcaatccttgaacactttctccaacaagcgttcttttggaactacagtcagaatggtatgctgcttagagggcgcggtagacaagcagacaaactgatgtgtgtgacctagtctgttgaccctcgtaccgagagcgatgcctttggtgaaatccaggtgagtgatattggcgcagcaatggtgccgcacagaactaatggggatttcaataggtccccggagacaagtactggggtgcgcagacccagcggtaagacgacccgtgaaatcgatatgttacaagggaagaaacgaacaaggtcgctgatggatgcagctccctgaaaaacttcgacatcaaccagccccaggaccgcatgcccgccccgttgatcaaggccttcggtatcctgaagggtgctgctgctgaagtgaacatgaagtatggccttggtatgtgaagctttgcgtaatcagatatcgtcaggttattgacttgcataagaccccaagattggcgaggctatcaagcaggccgctgctgaggtcgccgagggtaagttgctggaccacttccctttggtcgtctggcagactggttccggcactcagtccaacatgaactccaacgaagtcatctccaaccgtgctattgagatcctcggtggcaccatgggctccaagaagcccgtccaccccaacgaccacgttaacatgtccgcctcctctaacgactccttccccactgttatgcatatcgctgccgttgttgagctcgagcagtcccttctgcctgccctcaaggaactccgtgatgccctccaggtgaaggtcgacaagttccaacatattatcaaaattggtcgtacccacttgcaggacgccactccccttactcttggccaggagttctctggctacgtcgcccagctcgaccgtaacatcgagcgtgtccagtcttctctccctcacctgcgcctcttggctcagggcggtactgctgtcggcactggtctcaacaccttcaagggcttcgatgaggccgtcgctgccgagatcaccaagctgactggcaccgagttcaagaccgcccccaacaagttcgaggtgctagctgcccacgattccatcatcgaggcctccggctccctgaacaccctggccgcctccctgtttaagatcgcccaggatgtgcgatacctgggctctggccctcgctgtggcctgggcgagctaagcctgcccgagaacgagcccggatcttctatcatgcccggaaaggtcaaccccacccaatgcgagtccctcaccatgatctgcgctcaggttatgggtaatcacgtcgctgctaccatcggtggcatgaacggccagttcgagcttaacgtcttcaagcccctgatgatcgccaacctgctccacagcgtacgcatcctctctgatggcatgcacagcttccgtatccacttggtggagggtcttgaggccaacgagggacggattaactcccttctccacgagaggtatgctcttctgatccccccccttacttttgatggcaaattctaactgtatgatagtctgatgcttgtgacttgcctgaaccctgtaattggttacgacatggcctccaaggtggccaagaacgctcacaagaagaaccttactctgaaggagagtgctatggagctcaaggctctcagctccgaggagttcgacaagcatgtccgccccgagctgatgctggctcccaaggagttgtagacgaacagcagtgctgtcctgtgacattatagaccatttccgatagcatgtgtatactgaaaagaatttatgtttgatcgctttgtgttgtgatgcgatacactttttttgtatgttgtagatcctcaactttctttggggttataaatagcacgatcgcgaagccgatcaagaacactagtaaatcagagttgccgagatcggtttaatactagtatatccaataaccctaggagtttttcaatgcagaaataagcagattatgctaaaaaaaaccagacagaaagacaaaagaatccactatattatacgaagtatgtggtattaatagaaaagcccccttagtggcggtgtctcacctgcagggctgtacggagaacggagtacctgaacccttcgaagtcaagtacttatttcccatcttgaaaagttcgtcttttcacttcgaaactcttatatctctcctcagttatatcaaagttcacctcagcacattaacttcctcaattccaagtccgccgatctcccccggcccctgataaacaaccgccctcaaccctcaaccctcaaccctcaaccctccaaactcttcaactttcaacattcccactctccaactctcactgcaaaaatgaccgcacacgcccttccaagcaccacaacctccgaggccgtaaagccaatcatgagctcaaccgttacctcagtggacgagacggtcaccgacggtcccctcttcccctccaccctcatctcccctgaagtgatctccctcttgccaacagactacacaatccggccaatgcgccgctcggactactctcgcggctatctggacgtgttgcgcgtgctgacaactgttggcgagatcaccgaggaggcatggaaccagcggtacgattggattacctcgcgcaatgatgagtactacatgctcgtggtctgtgatggtgcagaccgagtcgtcgggactggcagtctgattgttgagcgcaagttcatccattcgctcggtatggtcgggcacattgaggacatcgccgttgagaaaaatcagcagggcaagaagcttggtttgagaattatccaggctttggattttgttgctgcccatgttggctgctacaaggtatgtgtttttttatctcttacgtctatacttatcattgctgacttgttgtttacagagcattcttgactgttccgaagtcaatgagggtttctatgtcaagtgcggcttcaagcgcgctggcctcgagatggcgcactattactgagtgtttcttgatacaagttttttttttatttctcccgccttgtggttcacgccggttgtttgatatagcgtttaggtcgttttgtccgaggattcggggagtcgccgttgcccacgagaaacatgcgcaaaccatgcgttggttgcatttgaaccccaattgattgtcattggtatggcccttggcacacaacaaggcccaattgggccatttgtaggattttgcatccaccctctactattggcaactcaattgcgcaccgtgaaagtcctaaggctggggaatgcttggtctaccaatcgtgatcatgatggtgcttctgccattgcggcgatccccgtcttagcttgtaacactactgatgggtttgtattatctgctttctctcgagaatttgaaattaatgcattgcggggatggagacctagatggtctgaagcatagatgtgcgtgaaacatgacaattatatatcattgttatccaacttgaaaaattattgtctggtcagaaatagaaggttcggtttaactatttgaaactaaacactgtttgtttcattcttgctttgtctccaggcaccctatgttataccttccgtatattcaacgcgaaaattttaggacaaaacaaaataagaaattcaatttagatctggaggtagaatctggattacttcgttgacatccgacagggatacatatctagcaacccatgagtaggcctggcagacatgataccccaggggaaaagcaagacactttccattgctggagactggataagaatataattttaatactcgcatgggattcattttttgattcctttgttcccatttttctgcatgaaattgtattgcataaagtatttccagaaacaaggtcaaggcccaaggccagtcctcacagacagtactccagctccgatgcccgtaagttccatcatatcgcaaccatcacagcactgctcctttccgaacacctccattcccaactatttcataaagaaatttagcgggacttggcggcgaccttgggagcagagcccttagcaccctgcttgctctggatgcgctgggcaccgcccttagaggcggcgatcttagccttctcggccttcttggcgctggcggaagcagccttcttctccttggcgtccttgatggcctgcttgcgagcagcctcacgagcctcggggcgttgggagcggcgctccttaatcacatcgagggaagcaccgacgatgccacgctggttcttgacaacacggcgggtgcgcttcttggcgacctcctatatatacaaaaagataacccggtcagcaatctgcagtcgcattctccatcatttgatccgaataatggtggtgacgtgataattcctgctcttgctccgtttcatggtttgtgcgtcaccattcaattcggcctttgtccctccacacaatctaacaataatccaaggagaggggcgaccgacctcagagatacccttgcggtgctggcgacggaagagaacagtccatgcgatgcggcgggggttcttgcgctgaaggaaaagggactcggactttccacgctggaagcggaagatcttgctgtcgccacggacgaatagcttgccctaaacattgaacatcaaagattagcttctagcggcaataagaaaacggcaaaattcatgtgcggtagttcggcaagatggagagcgacagttttgacgtcgaagagtgaatgtcgaatccgtgatgccgttgttccctcgcacaagaattcccccccccaaaagcgacgacgggatttgcaaacgcaccttgccagggtagatcttctggccgctgaaggcgtcgtcgtaagtacgcatcttgacggatggagatgcgctgacgggggtcggttggcgttgagtggttgtcgtaaatcgtggatcgcggtgatgttactgacccaattgtggtgcgggtgctcgctaaagtgcgacacgtgactacctctgccctttccgggtcgacttatcgataaggtcacatgatatgtctcttttttctagtacttcgattgtatatgatctctgatcagaatagttgcataatgtagttaactagttaactagttaattcgaatcgtattacatatgcttcaatttatgccttattaagagtgcaggtggaaaaaaatacatgaaaagacatgaaaatttcaaatttcaaatttcaactaacaaaaagcgcaaggaatttggaattttcacagataaactactcctggccctcgatgaagctgaatttccttcgagtctggactatagatgtggctggaaacttttgtggtagagcggctcaagcgaagtatgtgtataccgtctacgcctatacagctggagtaagtatcttcttcaatagtcctatcagagttcgatattagaaatggatgaagttgacatatatataattctcaaggtgaggatcacggctgtgcaacaagcgatatagtgatcagtacactgcgaggactgtaagtgaccggactacattagatgtatgatagcggatgcgttaagaatggccgatggaagtcaaacacgcgggcgaggttgacggtctgctagaaaaagccagaataacttgagacaagattaatggaaggagcagataatgtgatcctactcagagcaacagggttgcctaataacaaacgcttgtaattgaatgcctgctatcgcaaatagaaagggttatctgcacttcatggtcacatagcaccaacggacttagtccatagcatgtgtccgagtccattcctttgccgtttggatcgcagcaggctcatcgtccttccatctctgagcaacatcgttggcgagcgggtcatcgggattcggggctccgagcagtgcctgaatagatagtagaatcgtacgaatctggagagctggagaccaattatctggaaaaaaagagaaacactattagacatttccagtttgagaataaatcgaattgtggcttactcttcaagacatccaaacagatgcgacccagacgatcgatgttggggtggtagatcttggtcaagaagcgaattttgggtggggtcataggatagtcgtctggcaggaagagctcaagtcggaagataccgcctgtatatgtcagtacttcaattgacaggaagattttgtaagggcgagcctaccctcatatggagattgcgcaggtccgtgaattgagacgtcgaaatagcggaggttatcgtcatggggtacagcattaatgcctggaacactgtaacccaagcaagacatgttagctgccatgcaaatgaccttttgagagagaaaagctgcttacggctctgccatcagacgttccgtctccttaatgattctcttgggtaaagccatggcgaaccggcttatcgacacgcgtatagacctgatttgaggagactgttcctaaggcagaccaggaactcgcacacttttgacgttgagtgggatcacaatatgtaatcggaaaagtcaacagagaagagtaaagcgcaagttaaccaaaaaaacaatccagatctcgacataaccggccgaggggctcctgcatggcggggttatttcgcgtcccgtatacgagatcatgtgatgtcataatcccacagcgacagccacagccacagcaccagccacgctcttgtgcttatcgcgttatcgcaactcaactctccacatgtgcagttcttcgcgacaagtcgaggatataagtctccaaccatgaaacaatgatagcgaatgccaatgtgaaagatgggaacaggtgaatcactcctaaatgcatatatcgtcttccgttggatgcatggatatacctctgactcccccgttcatgcaagatcgcggcccgacgaacaccggagattaaaagagcggcaatcacagtcaccatgtctagctcgatggaaccgaggcctctcacatcggctatggagagcccgacgtttgaagaggacagctcctttcatgtagagcaaccggtgggttctatgtcaatatccccttgtggacgcgatgtcgttttagcatccaaggagggcctacatgtcatcgacctagactcgccatattctccaccgcggtatctccctcaccacacaccatgggaggtagctgatgttcagtggtctccattcgctgcacgtgatcagtgggttgtcagtacatctaaccagaaagcgttggtctggaatttggctatgaagacatggcagaactccatcgaaattgttcttcacgcccattctcgagcaattaccgatatcaatttctcggcattccatccggatatcttagcgacgtgttccgtggacagtttcgtgcactgctgggacctacgtgctccctcgcgaccagcggtctcattctcagattggtttactggcgcaacgcaggtaaaatggaatagacaagaccctcatgtcattgcaagttcccatgaccggttccttcgaatttgggatgaccgcatgggcgcctacccaatcaaatcgatcgaagcacataacaccaagatctatggagtcgactggaatcgtgttcgacgcggtgctgtagtcacatgttccttagatagaactatcaagttctgggactacaccaacgattcagatgttcctgaaaagcaaattcacacaccattccccgtgtggcgggcacgcaatacgccgtttggatggggtatgctcgcaatgccacagagaggcaacaatgaccttcacctgtacagccggcgagccgcagaaggctcaaatccagaggacgacttaccgttggtacatagttttcccggacacaagggacaagtcaaagagttcttgtggagaccgcgcggaggtgtagcgaatggaattgaccatcgcgaatatcaacttgttacgtggggaacagacagggagcttcgtctgcataaagtcaaccctgaaattctggcgcgcgtcgggtacgaaaagggcaagtcttttatttctacgcgaactgtgacacgactcggtgccgtatatcggagtttccgcgacgtgaattcagatttggatctcgatgacgttgacgtggcttcctctgttggccaccagaaccagaatatcgcggcaggtactgggatgaacgccattactgttccgtacgctcggggttggataaagggaggccatattgatcgagttggcatgcaacccaggtcaaatttaagagccgatacaaatccaattgcttggatgcgcggtgtaaagatctcaggctgggacattgagacattaggagatgaaatcagccaggttggtgaaaagttcactaaggttgcatttgattcagttgatgtccgacaaagaaagatttccatctctctaaatgggccctggggtactgacggggcctccttgtttttgaaggttgatatcaagtttccaacgagctatcccaagacggctatcccaacctttgcattccaaaagacggcagccgtcaccgatgagtgggctgcgaagactaccgctgaattgcgtacaattgctgagacctacatgtctcggaatcgagggtgcctggaaggtgctgtgcgttatcttttaggcgaaagcagcctggaggacagcgtcgcgtggatattgggtgaaactggcgataccctcaagtcccctaacaacggtgaactggaaggtgaatccagcgacgaggatgaagtcggcatgactcagagccaagagctggggatgagttctgagctactccgccctgtcaatgccaacgtcatggtgcctgtggccaaagtatgcggggcgctttgggcaaatgacggccgcctcatttgcttcttcccgccgaaaccaaagaaggataaatcagccgagttgttcgagaacatgggcttcaaagagatgactcgttggtctcgaggcgataaagtttttgaaggcttcggccggttgcataccaactcacccggcccacgcggaatcggaacgataacgagcacagatgatggtacatcggatgattcggacgagtcatactcggatacatcgagctcttcgggctcctctgacgtcctttctgggctaccgacacctttcccagcatcccgaacatggcgcagtgccggcagctatggcattcaccggccgcgatcaacagataattctcagcggtctactggaggtggtgccacagtcaaatcagaggcaccccagaatatcgtatctattcataatctgagtgatatgttacccgtcaagcgggagttagcgagtcaataccgcatctgtggcaaagggacagatgtatgcgcccataacgcggctgttgcccttgacgctggctgctacgaattggcccaaatctggggtctaatcaagttgatattgcatgttcgaaaatgccctggcactttgcctgggtcagggctgtcgcaaaggcgtacgcgcaaaaaagcgggcagaattggtgatcttggaaaagatgggctgtatagagacttgacgggcagtgttattcgctggggtgaccaccctcttggcagtcattggcttgtccctgctcttttcgaacactttgagcgcattggggatgtgcaaatggtggcaatgctgtcgtgcgtactactggaagccaaccaagagggatatttggagaatcagcgagccaaaaagacgcctgggagacaggatttctcattagattttcctcctgtcccatccgcaatttcaaccaagccaccactcgcgacgccagcttcatctgttctcaaagaggcccaggctatgcccccgccccagacctcgacacgctcttctagtgagatctggcgtctcgattccactcccccgtattccacaggcaccacgcctccattcatgtcccgtccacgaggcatcgctgctgatcgaaaaaataccacccacaatgtgtccatggctgcatcgcctgatcaacaaacccaagcacgaagtggatctgggtttggatcggtgctggcgtcctcattatctcgttcattcacattcggaccgtcatctgcgtcaccgccgacaactagaatggacaagaaaaagccgactcctcacaacagcccagttgtggcagccggacaagtggtgagtagttctaatcttgatttgagatgcctgcaaagtttgatctgtctgacctcgactgctctctagtcacaggctcagtccgacaccgaaagcgatcaaccaacggagcctacaccaccacccgcaagattcaaggtcacatacaagaaccaaattgcatttgaaagcgacggaccagcgcaagactcttttcttgacagagatgaggaattgctgtatcgatcataccgcactgcttatgcaaacttattatcgatttgggaccttcctgtccaacaaagcgaggtgacaaagattggagctgtggctgatcgagtggacgacttgacttcaagccattactggaacagcactagctccgaagagaccgcattgcaagatccacattcgaagccaaactctcaaactcttgacttccagcgccattgcgccagctgtggccacgcgttgcagctctccgtctttaataaggaacccctagccccgaataccccctccaagcgaaatcagcgcaaaccatcaggccgccgatgccctaactgcaagccccggcagccactgccaaccaaactgccctgcgtcatctgcggcgaggtgatcaacggtatgctgattccctgtctgagctgcggacatgtgagctgtttcgactgccaccggcgatggttccttcgaccggccgacaaattcgacagctcattcgcccatccagaccagaacaagttccttccaacctgtccgacaggatgcggctgccagtgctctgaacacattgccgttgatgtccccatgcccttgttagagccggtatcatcccctggtactaaagaatacgcacccatcacccagcacagccttgtacaggcgaaacactctcatcgtcgacagtctgagcccgtcggcttggtttctaaccgaaaagaggatccgcgccccaagggcgttggccagctcgaacacgatttggatgtgtggcaggactcgtcgccgtttgcatctctggcgcgcggtcttggcggtgggctgagtcgtggtttgcggacgaaagaagatcggaagaagaacaaatctgtcgccatggaatcgaatttgaggaattcttgatttttcgaggttggcgttgaactgtgtctatgattttgcgtatatccattgcttttgggggaagactttcaactacaaacaacttaattggacaatctgatccatgtgatggcactatccatattcatccgatgtttattattgttgtatatttcgaaagttccgggtatccattctaaccttcaatccgtagtataaatcttcagtatggaggttgataatccccaggacttccgatgcaagacctacggagaacaatataatatattcctgcttccacttaagagatggtgccaactgtgtctgaatatggttggatgcttgtcaattggcttgcccatgatctagatctcgattgaggcgttaagcacggacgactaatagtccattatcaaagcagcgcaccaatcagaacgaggaggtatagttcctagctgtactgacgttgtacaacaaattaaccttaagacaactgccttttacttagataagaaacggagagagataaaagaatgacctcgtggcttcattaaaagtatttcactcttcaggtaacagagcaagcaacagggcgatctaaaaattcggaaaaccgctgaaagcagaggggagaacaatgctggatatctgctaaacacaaataccgcagtccgactccccaatcacccatgaaacaatgcgccagtccatttacccagttccagtcttaaagaagtgaatctacaactgcttgaggacagcatcggcgctggagagcacgaggctgttcttggcggcctccttggcggcgtaggtgaccttaccgtggtcgataatgatcacgtagcggtaggtgcgtccctcctcgtcagcccagccgatgctcttggagaacttggcgtcggggtcggagaggaagagctaaataaaagacaggagtcagtcaattgagtccgtgaatttttggggggaaattggtatgggtgggaagaatgatagatcacatacaatatcatctccagtgacaccgttggccttgccccaggcgctcatgacgtaggcatcgttgtaagcgaggacggcgacctggtcgacacccttggcgcgcaattcggggagcttcttgatgtactcggggacgtggttggcggagcagacgggagtgaaagcacctgtagagcgggatggcggtcagcgcgagaacttgcgcagaaggcctagagaggaaggaggaggggattgcattaaagagcggtcacgtaccgggaagagcgaagaggataaccttcttgttggcccactccttggaggcgtagtagttaatggggataccgcaagaggtgatggcaccagcctcctcagaccaggggatgtaactgttggtagtctgttaggtggagggacacaattagaggggctagctcaattactcacgagaacaccacgtcgtcggggaaggcgtcaccggacttgaaacccttagtagacattttgaggatggaattgagtgtttgagtacggaagagagagaggttaagattgtggatacaagaagaagaggggaagagaagaagtccaagtatttaatatcacggctgacacatatcggcccatcgggactaagtggggactggctctgtaccttacaagagaagtgaggtgatccgaagaagaaagataccgaaccacatggattatcaagaaagaccgtcgagactgggcgttatctgatgtatattattcatcggcgaattgggcgagagatgagtcagcctggatcattggttacggggagggaacgtgtcggctattaagataagttgcctcggatttagtattcctggctgttcctagctgttctccggggttcttggagacacaagtccatttgtgtcattggccaaaaatgaggggccgaggtgggggatgatgttatggagtgcctgaaatacaaggcataaggtgggatgataaggtcaggtgatatacatgcctcaggcctacttttgtcatcacgtcacattaatcatatcaatccattttgcgagaaattagtaaacattctggactgaattctttgcgccacattatcatacccctagctaagtgaactccgcatataccgccatttcaaattcactggtcaattcctcgaatctggcatcagcctgtgatataacctgagtaaacgtcgcggccgctatacccttgacccagccaatccaccagaagagattgggtcgaccggcccattgtagcgtgcccgccgaacgtttcccaggaatggcatccgcgatttcaatacggccggcatccatgtcaaccgtagagcgtagggacgcgctggttcgtcttcgaggcggggctttttggtaggagcgggcccatcagcagctcctgtagatcactcgagccaatggtctgtggttagaagatttcatcgacgctggctttggagagtatggatccaccgtccgcgagcaccatgccgaggaactttgtccagtcgcgcggtgttgaccacagaccgtggctcccagacgttagatcgcataaactcctcgagggtggtattgttcattcgtgcgatggcctcgccggcccagtcggtcccagagccatacatccagccttgtccgggctcaaagaggagtggataggtcttcatgatttcctgtggggtgtcagatgcacatcgatacttgtggcgtacataagaaaaagatttacaaagtcattgtcaaagacgctgttagtcttgccattctgtctcgcccatctcgccagcggaggatttgaatgataaccacagccactttgatggctcattagcaatcgaagtgtaatggtcttagtccggggttttatcaagcatcggccctccgaaccgacaccatacagaaccgggggagcacacagatccggaaggattggagctatatcatcatcgagggagatctgtccgcgatcgacacaaatcatgatggcgactgtggtcatgagcttggtgagagaggccattccgtataccgcgtcaaagtcaactttcgtactggaatcctgtgacaatgtgcctttggacagtgtatagagttgttcacctgtgatcgtgatcagtgagtatatccccattcgagatggaaattgtatatacgtacccttcttgttgacgactgagcatacataagaatgcatgactggctttgaatcggcaattgctcttcttactgaccgagagaacttttccatctgagatccagccgaaccactatctataccactggaaccattcataccagtggaaccgttcacgccattagacacaagagattcgtttggagattcgtgagacgtgccacccacgataaccagggctgagatttctgccgcagctgccttcatctcaagggcatcaaagatagtccctgctagactcttgggcgagcacgagggagccagcagttgcaaaaatgacatgcccacaccgaaattttggctcagccaatggatcagctcgctgccggacatactatcgagaccaaaatgagaaaatggacggctgatatcgatgtcctcgatggagatgaacatgagcttggccagccgctgtgaaacagcctctgccagtacgatgactgccttgtcgcggtcatcagaaatttcgggtatcagtaggtcatcaccactggcatcgactatcacaccaccgctgctgccggcagctttgcgcgactcgagtgttgtgactagcagcgctgagcggcgatcctgttctatgcgcgtgacctgaaccaagctgaggttgtgcttggattactcaactccagtgagaatgtgaccctgcgtgagactgtcaaagtgctttgacttgagctgcgggtgcgtgaagcggttgaagtgccggataaactctgactcttcggcttcaatcagccccgaccgcaacaggttctcggcatactcggggttgcggttcagcgtgcccacgcctttgatcggccccagtgagactgtggctgctggtaggccattgctgatgcgctgccgttctaggttatctagcaccgcgttggatgctgcatagttggactgcgagatgtgaccaacgtatgtgactgttgagctcgtcatgaagaaatcgagattcgcgttgacattaatggtggcattatgtaggtttatggcgccgtttaccttgggacgaatggcagtgttgaattgttccagagtcatagagtcaaagaaagtgcccttgataatgtcgatggggccttctccatctcggtaatatggaaagtcttatccagtctaattgggtgaattttaccttctcggatcggaggagcttcatcgcatctgccaaaagcctattttcacatgttagtgggctccatgcattatacctgaaataatgtttgggattcttgccgttcggcaattctcagtttctcctccaggacaaagttgagatcaaaggagaagaaactgatgctccgatcaaaagcattcagccccatattgcccttgtccaagacgtttccacgtccaacatcaataagccttccacatggtgctaggcattttaagctctcgtggaacccggggccagagatggttgaaaggacaacatcaataccgcgacatcgtgcctgcttcagtatttcatccttgaactctagagttcgggaccagaagatatgatttgcgggaattccgcacacagatgagatagtccttcttttgctgtgttcccactgtggcgtagatttcagcccccacgcactcggcatattggatggccgcaagccccaaaccaccggtggcagcctgaatcaacactgtttcgttgacttctaaatgggctagatagtctagcgcatatattgcagtcccacaggcaattcccacggtagccatctctacaaggtcggcatcattttcgagtttgaggcacttctgtaccgggctgcgaaggaaggtgtcgtagtatccgcgctccaagcatatgaccttgttgccaggctggaggtgagtgacgtcctctccaaccctagaaataataccagtgctctcgttgctcgacttgacactttcaaagttgcccattgcaatgacatagtcctattatggtaattagtcgccttgaatcctgcgttgcacggtagggatatcgtgaacgaaccttcatattcccttcatattcaatcccacagccttcacctcaatctcaacctcatcgacgtcaagtgcaatgtcacatgttggtttttctcggaaatacagagtatccaaaagacctggagtctctagtgccacctggacattaccgaaagttggaaaatcttgttcatctctccctgttcccgtgtctagagtgaactcttcgttcagctccatatcggggatgacacgatatagatgataccgtccttgaggatgaagtccgtctcacacgtcgctctgttggcggctgtgacaactgtagtccagacatccgtaataggcttagcgagatcaaatgacctagcggagtcaaaccttggtccatgaaggttatacatgtagctcacgcggttgctcactgttgtcctgcccattcctagaatggccacaccttcaatactctcaggctctttgaatgcaagtgtctcatagtcactggcaaagttgcccacatacacaccagtcatgatgctgtaaatatcttcgagcgttatgcctccggattcaagacatttgaaacagcactcgtcatgccaaaaaacccaccatcgaaatcctccagtttattggaaatacaataaccctctgtgtaccgcatattccctgggcgtaccttttggtgattgtagaaagcatcggcgttgaaagggtttcttgggaaagggccgcgtacgagtttctggctcaccaaaagatcccagaaagatttggggtcctggacgtcaccaggaagtcgacatgctgatgaaaagagataagtgtcagttgagaatggatatgaggtatgaaaagcgagacaggggcgctagaagagcaagggggcaacaggatagtaacaatatgatgacttgcccattccaacaatggatctcatttattttcggctgccgtgccgccttccgggattttctcgccacgaagacgctaaacgaacaacgtggtatttggcccaacaggatccgtccggccttgctttccaaactagtatgcaaactcgtcgtcagccaagaaagctttctctgggccgctctaggcgtccccaagaaccagctcgccatgattgaaagcgaagctgtcagtggccctaacccgacagatcgcaagacccgctctcacgcgatatggaaatacatggttgacacctttgatccagtcgccgatcagacgcatatcggtgctgacaatccctcctatcaggtctgcatgaccggtgccttcacccgcaggtgtcacccggattatctccctaggaaggcgcatgccaagctctccagcccaggtgctctagacggtctgcgaatccacacagacgatgtcaacgaggtccttaattacataacccccgacactgaccgtcgccgttgtcatggacagcatagactggttcgacccgagcgccgcagccgcagcctctcagagtactaaattgaatcgcagtctaaagatgggtgatcgtgtaattctgcgctcctcggcactcgtcctttggtatatgaagacgttcgaggcccacggcttttcccccaaacgagttggtgcgcgtataagtggcgcctgcatcgaccgcgtcaacatgtatgcgtcatgttggatctgcacgaaggtggagaatttgggctcgtcgctcgagatagaccgcatgcatggcctgaaaattaggagcatgtctactgaggtctgaaatatgtagttcacatacctagaagtgtcagataacgctagcgttgcggaacgggccgaccccgctttaccatcgtcagggggaatagggtgttttttattacaatgcatgaccgtatacggagtactagattggtaacaatctttcattgaactaattcctgtctaggaactatggcgacaagaggtctcaaaagaatcattatatgacggcaactacaaatagtcaactagttaaagcgtatgcttaaggcagaaattgcaaggcacacccctactttcatttatccttcctttcttctagtagtcatcgcacaatgttctcctctccagcaccctattactcccggtgaaagactttgctttcgcagacagggctgtcggcgcccctgctgcttccgcttcaaccccccccctctcttcattagctagttaactaaatggtctccttctccttttggcaaattttattttagttcattttcctaaacactaaaagtataatgtagtacgtacatatgcatagcctgttggcaaatgacttgcgacgttactacatgtatgtaggagccaaacacatctagatcaacaccaataaaatctgctcctagcatccgtgtctactgtcagattagaggccttagctatgtagccatctgtcaataaattccctagtgatcgttgtgcgtcaagagatgggtaagctgactgcagcgggaaggcttcttggcgggttcagccaaattttggggcgacaaggggcattggcaatgtctcggatctcccgtggccgtcttcttgaggtccacagttgctgccagtgctggaatatcattggtggcctgtcaggcaaaactacgccaagtagatcggccccgggcccgtacgtgcctcttaacggttttcggacaaagatcaacaacaatctcccgtggagcgggtttggggatcgggcttggggaccggatttcggagttgaagtgtaacttccatacccatgccctaatgtcactgtgatttcacgacatatccataccatgacaggaggagttttccgtcgagggaaaagcgatggaaaagtcatctccgacgaccgaaccaactgtacgagggacccttcccgcagcagcagaagaacagcaccaagaacacgaagaagaaccagcgcaatttaataatgccaatttcactccaaagaaaacatggcgcttctgggccgtgttcccagcactatgcgcgacaactttcctctcggccctcgatacatccattctctcaaccgctcttcccacaatcgcccttgacattggtgctggcgaatcgtacatgtggattacgaactcatacatcctatcatcgaccgttgtcctaccattgttcggtcagacggcaaatatcttcggtcggcgatggatgctgatcatctcggttgtcatatttgccttagggagtggcatggctggtggtgcgaagaacatcggacttcttattgcgggacgaacaatccaaggcatcggtggcggtggtatcaataccctcgtggatatcgtcatttgtgacctggtccccctccgccagcgaggtaaatatgtcgcgctcatggcagccgtgtgggcagttggaacggtgataggccccgttctgggcggcgttttcgcccagtatgtctcatggcgttgggtcttctacataaacctgccactttgtgcagcgtcacttctattgttagtcctgttccttcgagtcacacacccgcccagcagtggtaccgtgtggctccagctaaagcgcgtggacctcgttgggaattccatccttacagctgccgttatctcaattttgctcgccctcacttgggctggaacaacatacacttggtcttcgtggcgagttctcttacctcttatcctagggctcggggggctctttcttttttacggccatcaaatgtcacggttttgtgctgagccctcgattccgctccagttgttctcaagcggaactgggacatgcgcactgtggattgcttttcttcagtctgtcctgctgtactgggtcggatatttcctgccagtctacttccaggctatccgtagctcgactgccacagaatccgggctatacgtgcttcctattactgccgcaattgcgcctttcggaatcatcacaggagtgatcatcgccatgactggcaaataccgcgtcttccacttcctgggctatatattccttactcttgcgagtggcctcttttcgctcctaggtgaccactcacctgctcgcgactgggctggcttccagattctgttcggggctggttctggtatgattttctctagcaccctacctccgattcaggcatcgctgcccgagtctgacgtggccaccgcaacctccacctgggcatttatgcgcagctttggttgtatatggggtattgttgtcccaaccaccatcttcaatacacgtgtccaggagctgctgtatcgtgtcagtgatgtgtctctgcgtgcaaagcttgccaatggcggtgcatatgccatggccagtgaagggttgatgcgtactttgcacaataccccgaaccttatggcggaagtgctcagtgtttatcaagatagtttgaaatgggtttggtggatttcgattccgtttggtggtatcgggttgcttctttgtatacccattaagcagctggagctcacggaggatttgcacacagagtttggattacccagcattgcaataagtagggaagggtgaaactggtaatttacttttactatagatatttggctccaaggttttgatgttcgtggtctcaagatttggtggattgcgattgcaaatagtgtatttcttttcttactggatataacgtttaatatgtatattatattggaggctgctctcgagttcaatcccaatgatcgaagcagtaatcccgacatccagttacccattccggttgacccccagaatagaaggtcaatgccttgtatcattaacatggggtgttgtctccatcaagcgagccaaagtaacagcttcccgaagcgcccgtccaacatgcccacgcacaccagcctcttccatcaccatcaacccaccaattgtgcagccctccgaggacgtcccttgatccttcaacagagcggggtggatgccactctgaagcatggttgccgtcccttgcatcgactgaaagatcatggtatgagccaggtcccgtggcataccaaccgccactgcggcatcaatcattgcgtcgcaaataacagcgaaaaaggctggcgtcgagcccccgacagcggtagtagcattcatcaacctcgggtcaacgtgtactgccttaccaatttgctcgaagatcgtcgtcgttatctggagatatcgctccggcaatgcaggctccgatgtttcaatagccgtaagtgactgagatacttgggctgcgatgttcggcaacgtgcgcaccacccaggctctaccagctgtgttatcgttggtggttgggctgccgtatattgtgatttcgagcttttgtcttgtccagccggctgcaatgctgatgataagcttgtcagtcaaggcttcgcggagcccaggctgcaccaggatggcctcgatatcggcagggtctgcgcctagaattataacatcggcagtttgtacagcctgtacgttgttgccgcgagaaatgcttattttgtccaaagactcggcgaatcgttcggatagtcttttctccgagtttgcactgcgcacgcatgcagtgtatcgagcaaatggtaaatctttagacttctctgtgggtgcattaaccaagccgtctaggatggcaatgcccaggttgcctagacacattagtcgacgtactttaccctatggttgcacactcaccacagcctagaatgcaaagggttccttgttgaatgtccattgtttgaatcaaccgaagaaaatattagaagggaacaaaagcaaacgcgaacttggaattttgaagatcggggacgcttccgagtgtggagaaatccgtaccccgccccaatcgaatccgatgagcttcatgaggttcgggtttttaagatatttagtgcttgttcttggaaagctatgcttatttgcatttgtttctcctacactgaccttgacgcggtagctgaatacattagttagccttggaagtgactacaagtgttgttagtaccatccttctatgaattctgcggttgaaaacttcgagaactcaaaataagcattcagtccataggttataggactcataggaatcatacaagttatagaaaggcataattggagaaacatcgggagtctccccgattccaagtttcccctcagctcttatcggggcacttttctccaactccgcataatataactcttttgggggaaatgcggggagaatactatatcagccgaacaatagcccacgggagatgcagttatttacttcatcatggtttcgacagattctattattgttgtcggcgctggtgcttgcggcctctcggtagcactgcatctctccctacgaggctacacaaatgtctcggtattcgcagaagatgattatatccctttcggagacttgacaaatgtagcgtgcccctaaaagctgtttattttccataacacaaagagagaaagaaaaaaaaatagaataattactgatggctcgattgaaatataggtctatcgtgcagcacaaattgcaggcgtgcgatttttcctgggacaacaaattgaccaaatagtctacgtgagcacgttgaccgggaaaaagagcgctggtattcgcatgaggaatgccggatttcatccctcgtcgctcatcattgtcgaaacgggggctagggatggcgattcgtccgaaattggccagttgcatcctgatcccttggccatacccctttcttgctataccaacaccgacccaaatttcgtcgtcgaatacgtgccagaagtatcttcttcggttatcctgttgtccaaaaatttggtacaaacctctaagatgtctttggtgggaccactggtcgtagatctcttagagacaacgggtggtcaacaaactgcagtgcaggttcagaaagaatcggggacttcacttcaacccttatctaggctgtgagagagactcatcaaggatggaaatacaaatcgatatattcacatcgcccaataattcccggttctcgagaccgactgcgatgtacgaacgacctatgtctaaacatacaaaccttcattatcttatttacaactactctgttcttcaagagtaaggcagctgcaatttatttatgaatcggttgaaacactagatgtcaaactatgaagtcaacgagtcaatattgtaggtcgtcgacgaggtctatcaacccgctcggggtcaaccaattcaggagctcctggaatcaacacagcccaaccaagacagggacgacaaagacccatcgcaaaagcctccgtgatacggagaactggacgtgggttagggcaaggtactcgtctctcacgggcattcgcttctctacagcgctcgatccacactgcttctgtgtgcccacagccactgataccgcagtggccacgataccatttatatcgtactttgcacatggggggtgatgaattcttcaaaaagtagagctctggggtaagtactcgcgatactagccttgggtggagagagttgatagaatatgggaggcttggaagaaaatatacatatttgtagaatctccaaaaagccctgggcccaatgaaatgaataacatcgcattaaaatttcttttatcttgcttttccttgtctaagacaaagctaataaggtgctatgatgattgaacaatgcattgcattggttgatatctttgttccaaatatgaaccataccctagtttccacttgattttcactccattctgagctaaaatctcatgttattgactattcaccctactcatgttccaatatcgttgcagaacaccaatatttccaccatcttcatcctgatctcgcagggccaagtcgatttccgatcgagtcggttatccgcaagttgcatgttgactttttgttgaccgcagaagccgtatgccactagtcatctttgtagaatatagcgactcatcctgatgtcagattttatcggtgacacaacagtggagatgtattggtccgatctgactgccactccgacagttcatttgacgctatggcttggcgctgctagaagaatcataaggtcactagatatcaaaatgtagttgtctaaatactgtctttgtaatttaatatctactgttatttcacctcaaatgaatcatcgcttgaaattataataattctcgtacatagtggtgttgggttgtggccagaaacagatatatattcctcatatatacaacaacaattaatctaacatgatagcttgcttcttgatcattaatattgatattgatttctatcgaacagacctatataagataccacaagtcacaagtatacatatttcagttaccaggtccgtcgagtacgatatctactgccggtcatatggctaggaatttgttggtcaaatcactgtagaacctccgcttgaaaccgaatctgttgtatgaattaggtaatcactattggcacagtagaaagatccttcattggccggtcgatcgttagacgttgtacagccttacgtggacatgactaaagccgtctacgggtcccaacctggcttggaagcggttaagcttctcaacttcgcaatctgacctgaagacaaatttgatttcatatcccctgaaatacccaccatggcaaatctcagacctccattcaccgaggagacagcgcagaaaaaagtcaaagcagcacaggatatgtggaatacgaagtaagtctcggaatttttcatctctatggccatgttcgaaagaagggtgaaggcttcatcccttgcattcttgccgacttgtattgtttgtccgtgcagatcgccctggacacatgcaacatgcctccgacggggaggatttctcttgtgctgttgagatgatggactattattatttgattgtgccaaaatagatgacgttagtgatgtcatctcccgttctgactatatgcgattagggaccctgcccgagtcgctcagggatacaccccaacgtgcatatggcgtgttcgagactcattctttaccgggacagaatctattgtggcgttcttgcaagcgaaatggaaacgcgagcgtagttacagacttcgaaaggaactcttcgctttccgggatgatcgcatcgccgtgcagttctggtatgagtttcaggatgtggaagatgagatgcgctggaaacggtgctatggattggaggattggacttttgatgagacagggaagatgcgcaaacgtatgatgagtggaaatgatgttctcatcggaccggaaggtaatggcgaggggcggtggtttgcagacgagcttgacgtgaacgatgtacatattagtgagcagcattggtgatatcacgatgcagatctgaatagacccgaggatgtgattgttctactattactgcggagctctataaaatctatataactaagaaggaggatatatatgtgcaactttatttggactcttaatttggccctaagaaccggatactagaacgtgcaaagcttagggatatggcatgctcaacacagatagacccctgtacagataagatggttaatagccctgggggttgaaatttgatttgttattatcccccttccttgcgggaatgccatatcgcccggacgatcgcaattgatgttgacaatgagagcacgatatgagtttgaattgtgagatacaaaattatttgagtcaggacctgagatatttcctttgaaaaaaagagcaacgaatccattgatcaaggcgctagtcccgagagcggagcagtgtgaagtgtgaatagtgacaggaatttttaatggttctgcctcgccacgacgctgatcgatcaaatctcatgataacaggcaaatatgcctacatggagtcaagcgaatacatcgtacccagtaaacaacaatagagggtgctaatgacattccgatgggaaggaaggaatctctcattccagtccagcccaagcatgcaagccaacctcttgcccttcatgaatattgacagttccaaactttttaccctccgtcttgtgtttttatctctgtcgcttaatatcctttctcttcttttttcccgctgcatctccgtcgatgatgtggtgttgaccagcccttgtcactctttagttttcttctcttccttctttcccagaatagtctggagccgatctttacacataacgtctttttgttgactcccagaaagagctgtatttttgcatttgatctatttttgttgtgcgttgggtattggtctccacagatgattgttgacgttgaacggtctgctaataggcgtctagaatcacgactaatctctaaacttcaagaagacgtggaaaacacatgcacgacttgcagagcctctacgatggatcagataatgtcagacgttaatgactctcagcggaggcgtcagcccttgagagacgcgtcgagtcggataaaccattccaagtcgccaaatgtcgtcgagacaccgcgcctgaggatcgaggaatccgagcagctaaagagtccagaccgggtgtccttccttatgaccccgaccccgcaaagaaacaaggaaaatgaacggctctccgtggccatcgactcgcagcctgactcagcccggaactccatcatgtctgcagcatccattttgtcgaccaaaggtaagaggaaaacacatgtgggaccatggcagctgggacgaacactggggaagggagccactgggcgggttagactggcaaagcatgctgttactggacacacagccgctatcaaaatcgtttcgaagaagtcagctgctatggttcagagtgagagtatcgcggcaatggaccgtaatatggggaacttccctaccaatgcggccacccgacaaatgccctgtggaattgaacgcgaagtggtcatcatgaagttgattgaacatccgaatgtgatcagcctctatgatgtttgggaaaatcgaggagaattgtttgtgcacccaacctttgaaattgagaatacactaacgcaatagataggtaccttgtccttgaacacgtcgagggtggagagttgttcgattatgtatccaacaatggaccattgccggaagaagaggccgtacgactattccgacagataattgcggcccttgggtattgtcatcgtttcaatatctgccaccgggatttgaaacccgaaaacattttactcgatgcaaaccataatgtcaagctcgctgattttggcatggcggcactgcaacctgctggccactggctgaatacttcatgtggtagccctcattatgcagcaccagaaatcatttatggccgcaaataccgtggcgacagagctgacatgtggagctgcggtatcatcttgtatgctcttctgactggttacttgcctttcgatggaggggatctgggaagcaccctgcggcttgtgaagaaaggagactacgagatcccttccgagttgagtgatgaagcagccgatctcatccagcgtattcttcaaaagcgcccagaagatcggatatccatgcaaaacatttggttgcatccgttactaactaaatatgaaaagcttcacaatgcgatgattgatcactacgtcggtcctcctcctgccctgtcggtgaaggactgcggtcaaaccctgtcctgtcagcaggacatcgatctcgatatccttcgcaatttgcagactttgtggcatgatgtcaaggcagacgagctaattcaaagacttctttgcatcgagtaagtaatatctggtagatatgagaaataacttgcgtgacgctaataaatccccacagaccaacgcatgagcgaatgttctacaatgctttggcaagatttcgtgatgagcagctggagaactatcaaggacagcctctagagtgctcagctagtgactatcaccacatatctcgcactggcggtagaattcgtcgaggccgcagccaaacgggtcagggtagctccaagcatcgctctcacttcccatctgttaaagagttccctcgtcgcctcagctccttcaaggagccaatgtcccccgggacggtggcgagctatgacccataccggtcacccaagcatagtgacacagcatccgaagcacagtatgcccatgttaccgtccgccgagagccctcagatcaatgccaagctattctatcgtcgccaagggtgaatcctcctgcttccattgcagaggagcaagagccagaagaatcagatcggccggatggctcgccgttcacggttctccagaagcgaaagcagggacctagctctatgaagtcattcgtctcttccagggtacctcattctagctcccgcgcgccgggattgtcgacgcactcgatgagctatcgtcgcaatgtttctttccaccacgctcgcaaccgctctcatggatctgcatctgctaaactcaagaaaagaaagattgtctcaccgaatcagccaaatgagatcaagcggtcaccgagtacctgcagcttacaacttatggcagatggcctcgatatcccggatatgccaagcagcccatccctgccagcacagccaaccatggtgcgagggaatggcccaaaggtcaagagcttgggacaagtcagaaaggttcgtgatacagactacacatggagggaggacacccggaaggtctcccatgagctcagccagatctgcgaggaggcattcaatggaagctctgccacaaccattcgcactacgagcggtggatccggttacgaaacaccgggaactccagtctcaatggcaagccctgagcaagttcagcctaattcgacgaccctggcgcctaacacttccaaggagtcatccggaccctacaatattaaagagcttatcgagacacgccaaaagctctttgagcacggccgggaccgaaaagacaacgttcctgcttatctttctggtgtcataactcatctagatcgcttgatcgaagaagaccaggtccagaatggtgcacggaaaccgttggatgtagcatccttcaaagatcctttcgtcacttcaccaaacgagggcttcccccctgttaccaacgataatcgcgcaagccctttccgcgcactaagccagattagccctcgacggcagcaaaagccacggacttcgctcgctacatctcagggcggcgatgtgaaggccaccatccggatggtaccacacagctcactgccctccatggaagaagttaagcctttgactattcggaagaagaactccagcaagttcgcttcttccgatgttcatgaatttgctatggttgattctgcgggtggcgatcggaacctttccattggatcgcgacatgctggtcaacctagtgggctggctcccattgaagaagttccgctatcccctaaaaaaaccacaccccatgcccaggaaggaaagaaatggtcatggtttaagcctcgccctcagggctcttacaatcctcctgctctcccacccaaggacagccatctcatcattcctagtgggggcacaactgtgcacaatgcaattaccctcgagcctgcgtttccccccaagacacaaagcccacagcaacttccccgacgaaaggcatctatggatcgctttggcggtggctttttgaagaaacttctgactaagaagtcccctcagaatatggaagaacctcctgctagtgagtgcaacatcggcttcttttgcatcatatactaaccaatctatagacaatgaaaaagaccctcaaaccacgccaaccaaggacaatcgttattcttccctgatgtgcaagggtctcgcagacaccgacagttccgttgaagcggatgatccgccaaacccattccccaacaagcgccgctcagttgccaaccacaactggtttgcccgggttttccagatcaagcctgctacccacgtcattgcactcaacacgtccaaggttaagggacgcaaggaactctacaaactccttcgcgagtggcgggattttggcatggaggatgtgtacctggacaagactaacggcatcgttcacggtcgtgtcagcgaagcaaattgtaagtcactcatttcatccgatccaatacttgtgctaattatcccctagtcctccaacttcgggaggttgagttcactgctgaattctacactgtccttgagcacggccaccaagccaacctcagcctggttcgctttaaacaggagcgtggagccgcatcgtcttttaacaaggtcgttgagacagtgcagagcacactgatgcgccgtggcatggttgttgaagacccatttcgtgcaaagaagatgtccagcgttctggattccgtccctaaccacaaataaactatttcacgactcattttctggataacccctcgatcccactatgaaggatcgccttcaaatactgatagccaaccatcgtctttcggttctcaccactacgtccgcaaaccatcccactggcatgctgcgttccagccctgcaaaagcactttccttgcatctcctattgtccgcccgttcagatccacactcgtttttgtctcggacaagacccagaaacctcacaggcctacctagtattgccggccacatccatagtttcatttcattttgtacccatcgatcatttccatgtcttccctttctctacttgttaattatccatttatttccgcttgtgtgtcacttctgggttctacccatttgtcaattccaccaatcttctaatcgatcgggtttcacctcttcattccgcgtttttgcatacaatgcctaatttcagcgagtcgcccatgtcctaaggcatcaaagccaaggaaaaattccgtatatctaattagtgtcattgaagtggctggaatagtcaatgtccacacattatacattctatcctcagcgtgaacattgcccatggataggtcctttatccagattagggcaagtcacgtggtaatcactcgcatatgtacccaaatgtatgtctgcccgtgcccggtctacatcgtacatacatacgcggtctatgcaggtcgcagtatgctgaatggggtaggtgcatgatgtagcatgatgtagcatgaaaagaatgcaatactcgatctccaatatgcagccaagattcccccttcacagggacaaaccatgcagccaatagtcgcgctatctagggctgagaacccatccagctctaacactccacctagatcagaaaagaccaccctagatcagaaaagaggctaacgggaagtaagggaaacggcaccccacaacaaagagaaaactaggaaatgctctcgtccagatgggatcaattggatctgcaaagccagagaataatactcggtataattcgcatcatagaatttcatcagaaagcgctcagagatacaaggatcccaacggaaagtggaatagcacgcggcaataactgaatagcagaaagagtgatcaaacaacctccggatataagtataagcagatatttgataacgaaaagacagggaacagtaaaagaaatgagaggacaaacaaatataaaaaaagatcaaaacagttccaacgataataatcaaggcaaagggaaaatatgacacagccaacccaagtattttagtcgcataggcgagaaaacagatggccacacatacatcgtaaaagatgtaaaagagtagtaaatagacaaatgccttcccagtaatgtaaaatggaaagaagaaagtagaaagaagaaaagacaaagctgacaacagtgaaaaacgcgatgagtgaaaacgagacaaagtgcaaaaaaaagatagccacccgaaattcaaataacaatgcggataatatctgcagcctcgtagttgtgaaatgaattccacggaaaagacagccggagagtgtgtgattgacggtgatagtgcagaatgcgttcatgctacattttcaatcgaaactagcaaatgaactgcatgcacctgaaaatcatcccaaaccacactctcagcaaagccaatcaatccttggaattgcgattattcagatatcgaggccgagaaaaatcgaaaaggaaaaacaaagatatgggagtaaaaattcgtatgctgataagaccagagcccataggcctggaagtttcagtatcaagttcaaaatggtgctcgtgaagctcgtgggttcgcgtttcgtgaccttgtgatagatcagagagtgacgttcttgtctcgttcatcgtccaggtactcgtcattgtctggaatgtcattccgaaactccccttgcagcccaatccacaacggtccgatgagacctcaaatcttcttttcaaattgtagctctcaacacatggcacttggaccgtgtggccagcacacggcccattccgaatgttcctcattcctcaccggtcccgtaaggcattctttcgtgcatttcctagtttccaccaggatattgaatagcaacgtaggtattactattgcggaccgcggcgattcagcgcattgagcatatcactatcagtgctggagcgaccctgggaatcgccggggttcagcatatcgcgcacattcaggccacctcgttgcgagccacccggggtagaagttggcggcggtgtcactccccctggctgaggggtaccacttgacttgattggcacgctaccctgttgagccgagactgggggtatgctaccctggtgtggagtcataggcgcctggtggggctgcataggtgggaagggtgagccgtgaggtgaggaggaggggcgtgggtcgtagttataagccgacggcggtgaggtgcgccgatcgtggataggcggagggggataggcgtaagggctcggggtagtgtgagtttggtatcctggagcagatccagcgggcgtcacgggagccagattggttggatcggggtactcaaatccagaatttgagcctcggcggtgtctctgcgcatcaaaacatcagctcgagtctctctttctctccctcttaccagagggggaatggcggccttaccggatcgggcatggttgacgcaaggggcagcgggacaccatccatgaaaggtcgtccattttgatagtacatcccttggggcggtggcaaggtggtctctggagcctgcggctgctgttgagggggcagaggctgtccgtgggcaccgtacaggacaggcggcccaccgcggccccctgatccattctgtccaggtcgtaaatgagggtaggcggtgtgtgcgggcacaaaggcttgggtttgcgaagagactggggtgaacatgcagtcttggttgaatcgaacacagttactgcaccgtccatctgcggaggtctcgaaacccgagcaacgaatctatccggtcaaaattagcgcgtgatgactcgcaaatggggaggaatcccctctgtaccttccggcgccgacaataccggcatgcaatagccgttcgctgtcgcggagctgctgcttgataaggcccttgtcctgtttggggtccatatgcatcggcgcgataaggacccggcggaggtgggagacggtagggatcttgcgctccgtggatagcgttcatggcttgtgggtgcggatatcttggatccgggtactgcgccggggaatactgcgatggggcgtactgcggaggaggaggatactgcgatggcgcgtattgtgcgggagggggatattggtaggcacggtcctggtcaggtggcggagggtaggaagtcggcggatactatgaagctatcagcaaccgcagccaccacaaagtcacagcactgtaaacaggctctaagacagcacatactgggtaggaaacctgatcatccggactgttccactgggtggctctggggtctcgatgatctcttgggtctctaggatcctggcgatttggatcaccctgacggctagggtcgtgatcgttgggattgcccgacatttgtgttattggggaagagtaagacgagataagtaaaggatgcagggatgatgtcgagttggtgaaaaggggagatcgaatcacacggacaaagtgagcatagcgcagtcacgcaggggaaaggcaagaagggcagatgcaggaagatcccaaaaaaaaaaaaggaaacagaaaaaggaaatataggaaataggaaagcagaaggggaaaaaagaaaaagaaaagaaaaagaaaaagagagcctcggtgattatgacgtgagcagatataaggaattgaaaaccccacgacaagataagcagagaagagaagaagaaaaagaagctcagatcggaatgggcagagaataaagggaatgaattatttgattggaaaagcacaggggaatttttagagaacggggtggagcccgggcagcgcgggctaaagcggcgccagtgacccatagacatggaggggggattactgtacagtgacagtgtatctatacgcggaccattgtatgtaacagtttgtgtgtccatgtcgaatacatgcatggatacggagtacatcgagtaggatgaccttaccttacgctttcatttcatccagtgaaacatgggagacaagattttgaaccatggaatttaatctagggtaccagatttccgttgccatgaagccgagaacggcgaccgctcttactttctggtttcttttttcattcttttcttttatttttatttttttcaactagtagtagcgcccgagagtaactttccacgtttttcgccactctacattattacctggaacaatggttatacctccataataataatggaaacagttctacatgtttagaaagattatttcaacttccaaagttgacatcatcatcaatgtggcaggtgacctcttttgcatgggtcaatccatgcacgtcaattcctccgagtgacccttgctgcgtaacccgcccatggacgaacgaccgcctcggaccgtagtcgcacaaccgcaaccggccccgcggaaccaggatcattttccatggcgatgggctcgggtcggggcgacacattcccatgcataatcggggttggtttaattgtattttatttttattccaaccattaaatggcagtattatataccctattttttgtcttgaccaggactccctagtccatcaagtacatggaactactgcatgtaggtactactttgaaagaaaaattcaagcggtgaaagtgtggcgatcagacttcagctgagggagtggggttaagctagaccactcgccactcttcaacaacgaacggcatccataggaagacaaaggttggatatggagtatggcacaaagtctgtgtgaggaaaaaaaagtgtgacgagagcggatctgaaatgaaccagactttggagggaaagaaagagagaacgaaggggggtggagtgccctaagttcccagggctgtagcactggatccggaaagcccataatgagccaaggtaacctgcattagcgctgcgctgacagggcgggttccttgtccaagagccacaaccacgttgtacggggggggctatttagcgtacgcccccccgtcaccgccaatctctgatcaaagtcttcagcccatgtcatttgcaatatacagggaatgtgggttctgagataaagtgtgaataatagcagatggtcatagcgatggggggttaaaaaaaaaaagagcccacccgcacaaccatggattgaataatatatcgagcagattgtaataatacgagtgctctgtactattgcgcaggattaatcaatcaagtttcggggtacttgtcccacgggccgctccggccttcccgccgatctatgcatgtgtgccatctggcaaaaatacatcctcggctgttacagtacagtatttatctacgtctcgggggcacatatatcttctacataccgtgctatcatagacatgacctacttgtcttggttacttaaatatttatgatatgattacatggatacctcatgaaaataggtacatgtataaagtgctcggttttcataaatataatacactatcggtaatacacagtaatacgacgtaaaatggagtacctcccgatataagacaatcctttcaggccacgtttttcgaacccaatcgactgcattgccgtccgcgtctttccgttccccactctcaggcgtggcatgttcagctttgtccttctagtattagcgtgctctccgaagactttctaagatccacccggtccaaagctgctggccactcgatgctgtttgtcctagagacgcgctagctgtcctccaaactagcccatccgacagggactgagcgctgtttgtcgaaactgaacgcccaacgctaggggacccattccgacccggggcctttttacaggctgcgacgttccatcgtaaagtttttcttataacatttttacattatataatatttttgtactttttttggtttcaactttgcatttagtgtgatctttttctattttctatttatttattttttttcccccgaaatttctaagttttcgtcccaactccaaggtataaaaccccctccttacccacacgggagcgcgtctatcagcaaggatggagacgggtcgggcactaatagacgcagcccgcatgtctatacggtcacgggaacaccataagcaccaatatagtaatgagtaaaaaaattcacagggagggcaaggtctgtgctggggatctgacgtggcgaggggttttttttttctgcactgagccggaacaaggcagtgctttcaaagtcggtgtacagcaaactcgaacgtgcaggtcgtgtgatgggagatgcctgatgactacctgatcctgggaaaagcatatgcgagatcggcaagaagtcatcattagccgagtctttgatctttctttgctcttctgttcttcctcccttcgggtcaagcaagtttcctatttctgttattcgtgtcatattcgcatctgattggttcccaccatctatactccgtacctcatcggtcaacaggtgagccatgctccttaactctattcgggcgctattcgggagacaaagcgagtcaattccactttgctttttctggatgtggttctcgggagcgtgcgtgaagctagggacctatggcatatttaattgatgcgcaggttaactgcttcggatttgctttttcgagtccggagtccattttgcttctttaggcttgcttttgactttgcaaatctgaaaccacctaggtgtttccggctagattggattttgtattgcatacagatgcatttagggtatcaccaatctaactcaacagtaggtgtctcataaaatcgaccgactctctcaaggttttaaaggtcgatccggcgtctaccttgatccctgggtttgagttaattggctgttctaggtcaataaacatcatgcctgtcgataacaaacaagacaaattgtgacatgtgattactcctaccctagacgtttaaccccaagtgtataaatcttgtcagcccttgagcaacagaatatagttcgggaattcagattccacgaagagtatttagggaatgaatagagtataattaacatgtttaatccccgacatagagtatagacccatcatggtcttgaaccgcgaacttctagccctaaatattccttgggaagtcgaaataccttcgatatctcgcaagactttagcatattccattctctgtatatctagtgacttacttaaggccgccattcacaagctttgagtcccaagtgtttatgaaataatgtctacttattctgtgaccgaggttgtgtatgtccttatatcgatctctcaaagatcactccgtactgaaagtgggaatgccaatcttaggtctgatgcgtgaaggaccatgacaatatactggaccccgggataagaaatgctcatcgtggacagccgagtattgagttgatacatgaccatcacgacatactagactgagaccagcggaccctgcctgaaatgaacagcatcgtccgagaatcagaaatccgcagtgcataccaaacacatacagtatgcattactccgtacaatgaaacaaaacaataccacccagtcaaaaaaaaaaaaaattggagtccattccagacaaggaaggtgctcatctcaaagcccaaaatcggggacggcggagtagaactatccgggccccaatccacattgcctgcaggcccaagtttagtctagcgggcatgcccgacaacgggccgaacgcgggcgcttgcggtggcgatatcatgcgcgtcaactgagtgcttcatttaattcggagagttgtgtcttctttggtttgcataactatgttgtacattcgaaattcggttggggaggagtgtagattgcaaaaaggttaaattgtatattgcacgcgaggggctgcgaggggctgcgcagccattgggtgctggcacggctagcaggattgcgtcgaagtgtctagaactgcgtgtgtcacagtagtaatgtctcaatttggagcgttgcccgtgtactatatagtctgcagtgtgcagcagtgcggcagtgcagcaactagaggtgatatgaccgcagagccaatgttagttgcgttatttgggcccgcgccagtgttcggcctgcagtagcaatccaggaaacgcggcggggactgacgaaagaagccacgtgcaggaggcgtcaaggtgggggatgggatcccggtttcacgtcgaggacttgcgagagacaaaagacccgagctaaggcagacgttgaacgagaaaaataaaatggagaaatctgacttgtaacaaatacgaacagctctttataccccaactttcataccacacacgcatgccccgaagtaagaggcaaagcgtaaaacagaacagattgacctctctcccccctcccgaggtcccgtccaatgccaaataggcgcgggtggttctctccaatcatgtcactgatcaggcatcactacactgttgagatacgtcacctgtttgagagacgaggagcggtcagcggtcagcaatacagattctccaacataaaggttattgtcccaacagccttccgatcctgtcaaagcgggaaggggagaaaaggaaaaaagggagaaaaaaataaaagaaaaaatagggaaaaaaaagaaaaaaaaggaaacccatcgtgacaccagcgctggttcgggtgggtaaaagggacggctaacaccgccaaagcggctagcttagaagtgaaaacagactagtcaagagggggcaaaaccggcgggaaagggaaatcgggaatcgatagattggaacagggcttacgaaaggctccatgaccccaaccagagtagcaatcatctcttgggcattgtctccagtgagttcatcgtcggcaataggcttgccaatagtgaaactgcgtagtcgaagtaatttgatgttcttgttgtctgcctcgtaaccctagaaggtgtgtcagcaagggcccttccaaggttccaaagatgaatcagacgtggagcctggcgcgagagtgaaccatggaaccaaagtcgacggcgtgagaacgaatcccattccagcaagtgcgattccccattgagcgcaaactgccaaccttggaaattgcgttgctgggttccatggttgcgttccgggagtgaaaattggcctaaaacacgggttggcctttcccgtaacccccgtgcgcgtgtcttccacatctcccgaggtctcgcgtttgatggttcggagcacatgaagcactcgggacatctgaaactcttaaattctctcgaatcctcgggttccttccatctctggggtagccggggtcacgtccagcagcccgaccacggcatcgcttggtcaaccgcaaagaactggtctctatgatctcatcagaccgttgctatcaaggccaggaagatggtactggtcgatgcagacgggaatgaattccgtttcaaggaccaatcccggtcggacgatggacgcaacctcgatagcgaaccttgtgccccctgcctccaagacctccgcgtcccagccataaataataatcaaaccgctgacaatgaaaccgaagcacaagatgatgggaaggagtaaagtctgcctcaagggacaccatacttcacattgggctgagggtggaataaacaacagaacacttctcaccttgggcttcgtcttcagagcagactccctattgtgatgcgtaaaagcatccacaaccgcgtcgtcatcgtcggacgctcccttcaaaaactcacgacgcatctccggcgcgcggagtacctccttcaagccatccgagttctcgtcgatgtcctctcgcagcagtgcaagtggctcggtctcggggttccacagcccgcagcctatacacagcgtgggattagtctcaatggacaaagatcacaaaggaaggcagaatagcgatggcgacagtggaaaccagccggaggacaacctaccaacaaaacaagagtttggctggaagtggacatagtatgctgcgtatgggcctttcttgccagtccgagacctgcactatattcagtgacttggctttccaagaaattcattgaacattgacacttaccaggcagcggagaaatgcgtctatacattttgaatcagcacaagcactgctaacgagcccgcagtaccacgcaccccgccacatacgcacgcatgcgacaggcacagcgagagggacttggaggggaagatagcttaccttgtatggaagtggattcttgctgaagcgaacatccctgtggatgcggaatacctagggcaaaagtttatgagtgccgggcacaggtaaagacaggagtattcgcaagcctaccaggtccttcacaggaagttcagggatggtagcatccacctctgcaatcttcggcgtgagggactcaataaatgtctcaaagtccttctttgccgctcggtaatccggatcatgcgctacacaggtcagctagcaactcgataaccggggtatatgcgcgcttctcaccctttagccattggcggtcattgttactagctagatcgatcaagaaaagcctagtattgggatgtaaggtctcatcctggtacggggtgttgcccgcatctcgagccttgggctttgcgatgatcacttcttgcccgggctccaggcccgctctgacgccctcacgccagagctccttgcccttcatagggtcgcttccgctgctggtactctgtcgttgcttccccctcgcactgggtttcttcttcgcgtcctcgtctgtgtcggagagttgttccggctccgcatcctcggcgggggattcctcctctgcttcctcgtacacagagccagaggactcctccgcagagacatcggactccaactccggctcgtcggagtcttcttgctcaaagtacttgctcttcctgctcgtggactttgcctggctgagggacaggtcgacgtttgacttgacccgtttgacccccggttcggcggcggacagtctggctgaagcgcgtcgctttgacgccgtaggcgcttcaggcgacgtcagatcaggccgagatgaccgtcgtggcatacttagataaattcaatgaaaacgttcaaactcggtagagtctttgtccaccctttcttctctatagagtaaggagttggaaccctggtttcgtgtttggaattcaagaaaagcaagaaaagaagcaaaatactgtagatgaaagaataaaagtgataagaataaaaccagaagggtcccacaggccttaaaaaccggctgtaataaacattctccgcttttagtcccttactgttttttatttttttcctccgtttttcccccctcaagacgtatcgttggtaccttcagagacatcaatgttagttgttgagaagtgatgtgtagaaattcagatttgttggaaatggcttattgtccatgattatatattccgatctcagctggaggaactgatcggggatgagactgcgatatcggtgatggttttgggctggctacatgtagttgtgcctaacatattgctgtctttatagggggtgcacaaggtcattgacttcactaagagctctcaatatgtcccaatctcggcccttgactcagtggcagatgtactcccacgcctagtcccctttattttagctgtgtcttcgtctgtcgctctgaccatatcgtagccggtgctcgtttggtctttattaaggatcgatggctcgcagtggtaataatgagaattcggttgatagtagctgaggtattccctcagcttggtcacaagtaccccttctaggaaccgacaagtgttggtagctgtgtcgactttgctgagtgatcggaggttcttgtctgattctggtaagtccatagatagttgcaacatcgagattaagagacaggaggttatttaggaccacaataacccagaaagaacattgaagacactaatgtgctcagcgagacagcgagtaggaaataagaactagtaaagtactgacctacttcagcaattgcccggaatcaaagaggcgatgttgcaacgctctgatcaacctaacctctgtcttcttaatgtttcaatgttgatctcagccttctattggctgtcagctgtcctactatatgcatgttaccgcatagcctacaaacaagcaaaaacaacgcccgcctagagaacaaccacacaagaaaaagcaaaggagagaattcaatgtaaatgagatctagctagtcaactaactgaaaagtgacatcaaggctagaaaaacatgaacctcaaatgagtttcctcgagggagacctcacaaaccggccaagcacatcccgaaggcagcagccgtgagtgggagatctcgcgggaggaaaaagcgagacaaaggaaaataaagaaaatggcgaacgcgccagggagacaagggttttctgaataaagctggtggacgtctccatacatcacacgcagaaaagaaccgagaaaaggaaaaaccagaaacacaagatcattaccattccgatgaaccaacactcctcaagcgagaagtactggttcaggatatccaccgcgtgtggcgattacttctttgcaaatcgagcaccgcggccagcagctcggaactcatcaaacacctggcgatcaatgttcgacagatgagtagcgtcggagcgagaccggtggctgctgggaccaagcgaaggaactggaccgaaaggatcagaggacgaccgaacgttctgcgcagtcgcatgcggagcacggtagataggccggatatcaccctggctctgagctgagccacccgcagttgcctcctgaagttgaggcatacgccagctaaccgactgtttgcgggatttggctgaatctggtcgttggtgtggcggaacgtaagcaggggccgatgcgcgaggccgatgagtcggggtgtccggcagatattgggcagaatcaagtcgctgagagctttcacgggagttaccagagatattccagttgttggttaactcaaggagactgctagacatatttctggtggacgaaacagtcgagcttccccgagaagcacggccggaattcacggagccactgtgggaaactgaaatggtgcgctggctgtcaactgaggcgagactatgggttggcgatgagccaggagcagtgccaatagttgagatgctcgagtttctcctgtgaagttgctggaatccagtgatgatgaacttccgcagaacactagcttcgtagatgattgcatccttgaagatcttgctacgggcaacatcatcatcccactcaaaccagaaccttccgaagattcgttcgacctcagggtgagtgtgttggttgagaagaccgtcgttctcagtgcgcagaaccgaaccgttggacatgacataggaataaaactatatcggttgaagattgaattagtaatttcccaaaagaagacaacatctcagccatgttacgtacctgaatagcagcagaatggtgtccaggaatgtaggtcagagtatcgaatgggaagtaaaggcaccaattatggtccaataacccaattcttctcttatccttcgaccaccaagcaaaacaatatttcatgcgaggattaaaggcagggcagctgatccctgcattaaccaactcattgagaaggcggatatccaagcccactgtgtttgccttttgcatacgttccactagagtcttgatcaaagtaacaagagttttgaaaagtgcattgcggtgatgcacggtgtaaagatgagttgcatgccatgggaactacatccgaagacaaagaatgtaagtatgacatagaagggcaaacggagaggtatggacaatgattgacttaccttccagatagtggtaatgaacgattcgtaacaacgctgagggaccttgctagcaaatgcactctgcaatttgttaaggtcagtaacatgaaaaaaacgaagaattcaaaaggaaaagtagacgtactcggtgaggttgctctgcgtgccgagtgaggcaaaacagctcctcgtcggtgagaaagccatcaaaaccggtggaccaactatctttgttgacaagctgaacaggattcccatcctcccatgaaatgcacttcgcccggggaaaagcagccttgagaagcttggctggggtgctgagttctatgtcgacatggcggctacccatccgtggggtactaccaacatcataggcacgattgatccggtcgacagtttcttcggcatccttctttgttgggaattcaacatagcagtccatggtctttccagtagaccgttccataataatatggatggggcatccttgagaggatggaagcaggttcgcactacgtccaaggaatgaggccacctcctggcgagtcacagtgtacggaatctaagtatcataattgttagtactggaatgttaaacaaagcagaagaacatggtggaaactcacgttagaaatcaccacaacaccattgcgagaaggtggacgcatctcaacgatgctcccaaatggaatggatgcttgctggaggagttcttcgattgagaagttttcaagacgctcaaaatccccaaaattgggggtcccaccctggtcgaatggccagcccatgttgatggcgttggatggaccaaagttgggtttgcagacgtttgctgtagtagagaccgttgtcagtgaggctcaaacagtttcactgatgatggtatagcaggtcgaccgatcacgatgaatggattttgaagatacttactgggttggaactgaccagagaggtcaataggattgtggtgagatacagtctcaaaaggatatcgacgagattgggactgaagactgagaggagaataggcttggggcacgaattcaaagggcctgggatggaatccaggctcaaactcaagacggcggtttggagggggacgaatagtggaagacgaagatgaacttcggttagaagaggatggggtcgaaggaagggaaggatgggataggaggggagaaacctgagcggtaaactgggcaggaacctccacaagagcctgagcagaaagttgagtgagagctggggtgcaatcagagggcgatttcttgagagaagaacaatcatcgacaattccaggtgagtgtttgcgactctcagagacaggcgtagtcacagtcggtgactctgggcgtgagttctcattgagagacattagatcaacattagctgctaggatacttatactggcaggccaatcctcaaatttgggcatatgcccatgttgttcactcatgttttagggctgtctgggatgatagtgcgtggaaacagtgcgtggaaacagaaatatttacgagagaaagtgcgtgttggtaagaatgaactatttatatgcgtggaattaggctacaccacgcgtttacgagttcttacctgtgccgagagatataagatgggattcgatctcacctttctcactgccatgtgtgctgtttgtataccgaggctttacggtacgtatttaaagcgacgcactcgtttctgcccctatccactaatttcacgtacctgatccgcaccaactgaaattctacgccttccttgtagatatcgcttctcttgaagataagtattctgctacttttgccaaaacaccgttggtcgctggtgtgatttcttcttgtttattcgttcaatactataagcgctatgtaggcaatttccgtcttgattgggaaggaacaggccatactagaatagtaggctagtgaggcactatgtcggtggaaatgtgttacaaaaaaacccgacatcggtataaagttctctcttaatcaatgcaagcctatgctatctgtacaggagtagaaagtggcaaacacagggccattcattattcggaatcaacaaggaaacgcttggcaatttaatcgaactgattgatcgtcagcaactgggtcaatggtagattattccatagagacttaccggtgtcaggaaagactccgcaacaaaacgagcacgggcattcaactagtgagctgttagtgacctgcaaagaacacgaaacatccgtacacatacgaagagcttcatctccgaaatctccttgtccacctcctccatgaattcgatcacgaaatcaatgagcttgtgggtaagcattttttccgtgtggaagttcgtgatgaggaaactgatgtcatatccctccactggcttccgacgcagaatgaagaacgattccgctcgctgggtgaggaaccgagtgaatttgtggacaagaatgtgctcgatctcatctgcctgcttgattctgatacttatgcgaacagaattgtagcttggctcaatcttcaccttttcattttcattcctgctgatgtgcaacctagaaagccatcaatacgtttgtccggtgcgaccttggatgaaatgacggtcagacgtacgggttcagtaggatctccggcgaagaatttgcctcaatctctgggcagttgctggtgaagcccagtatattagcatattccatgtttatcacttgaaataggggcaacttactgccgctcggatgtctgagaagcgaaattggagatcgtaagagctgcggtgagagaggaccgaacactggtaaatggagtgtgagaaagcctgccgctgaatatttgtcaagtgtcgaactcacgcctgtaggtagggccggagagattgactctaataatcaattagtatagaacgagccagctgatttgagctgtacccaccatgatgagggggtggccacaaggatgcagtcgtgacgggtgatgatggtcgggagctagttgagaaggaattcaattagcccgttgtgaggaccctttgacctaaggcagtgagcgagaaaggcagttctctggataacaggttgtcttaggcagaagaggagttgacgtcggggtgggcggtgatgatagtggttgggcggtgagagaccccccacgctccctcgtcccaggtgtttaccatttgccccagcaatcgcaagctctttcaagctcttcatccttctcacatcatccatatctaaaacttattgaaaatggcggctataccgagtatgtatggacgtattggcagtccctggaccactactaacggatctacagttattgtcaaacacgccggcaagcgccacgaagtcgagctcgatcctacgacgaacggcgaaacactcaagtaccaactcttttccttgactggtgtggaacccgaccgccaaaaggttttggtcaaaggtggccagcttaaagatgatacaccgctttcgtcacttaatgccaaacccggacaggtgttcatgatgatgggcaccccatcaggaggtcaaggttccgctgaccttggtcggccaaaggagaccgtcaaattcttggaagacatgaccgaggccgaggtggcacgacagaaaggtgccagacctgccggtttgcagaacctggggaacacatgctacctcaactcttccctacaaaccttgcggagtgtccctgagcttcaggatgagctcctacggtatcggccaagtggaggatctggacagtcgactctgtcagacctcagcagctttggtattggtggccttggaggttctcgggatttggccgcttctctccgagatctgttcaagcaaatgtccgagacccaggagggcatccctccactgatgttcctcaatgctctccgagctgttttccctcaattcgcccaacgtgaccgaaatggacagggatactcccaacaggatgccgaggaggctttctcccagatcttgaaccagttgcggactaagttgaccatcaccgaaggcgagggagagtctgctaccaccacctcatttgtagataaatatctcgcgggccaattcgaatctatcacagagtgtgaggatcccgctgccaaggaactcggcgagcaaccgagtcaaagttcagaagttttttacaaacttgattgtcatatcggaaaagaaacgaaccacctgcaggatggaattttggccggactcgaagaggaaatcgaaaagaactcccctcttttggagcgcaattctatgtacaaaaagcgttctcgcatcgcacgactacccaagtacctcacagtccattttgtccgattttactggaagcgtgaaacaaaaaagaaggctaagatcatgcgcaaagtgacatttcctgccgagttagatgttgtggagttctgtaccgagggcctccgaaagcagctcatccctattcgcgacaaggttcgcgagatccgcaaggaggagctggaagttgaacgttctcagaaacgtcaaagagttgccgaagagcgtgcagagcgtcaggcgaaagagaccaacttgggcgaaaatgtggagccaatgcagaagaaggccgaggagaccaaggctaaggctaacgacaaggacggcgatagccagatggaggaaactttcaaaactgatgccgagtacgaagcagaaaaagcagaagctatcctcgctgctaagaaagagctccaagagcttatcaaacaacaaggtgctggagatagcggaaccaatcagtctggtctgtatgagcttcgcgccgtgattacccaccagggtgctagcgccgacagcggtcactacacggcatacgtcaagaaacaggagcaggatgatcctcagacaggcagcaagcgccgcgaggcagacgacaagtggtggtggttcaacgacgacacagtgactgaggtggacgcgcagaagatcgagaccctctcgggtggtggtaagtgaaccgcattctacattttaaaagccattgctaatgacatattaggggagtcacactctgccctcatttgcctctaccgcgcgattgagctgcccaaatgcgagtaaatgggcttgccttagcatctgttcacatggtaaagaaatctgcaaatgttgcctctagatgatagaaacgatgaacatgaatgatgctagtccccaccgccttcgctgttaccaattgattgtcttatgccttgcaatgatctacattttgtatgttgtagtcctaatggatatcttctagttagtgacgacatatatattaatgactaagcaatgtacacgtgacatggttgagcctcggcccaaattgtctcaaagctctaattctacaggactggcaatgtaaccaccatgatacattatcgcagcatcctccagtcggcccttcgccggtctccaatacacacacgatttctttggagaccggtggtccgaagcgtcagcaccgcggcacaaccaaatgcctcccgagaaccatcgcgctggacgcgccgcctggtctataccggtatatttggaacgcttggcatcggagcagggaaatggttggacaacaaaatctcatcgccattggatcctgggtcgttagaagaccaaatggagattcgggaaatccagcgggtattcgacattggactcccgattgtacaagagctgcgtcgtaaccccgattacgtggaaaagaatgtttacgaaaacttcgctgataagcacaaaacccatcggctgacatcaggccccttggctggcagtaggggcttgggattacaggttagtctctcgttttctcattgggttccttgcatgaatgccgaaccttttgactaccaagcctcggaatcccgctttttctaactgtcccgtatctgacagaaagttttctggaatgacaaagagaagaaaatcattagcgtggtcttcttgggaccaggccttgaaggctggccaaccatggtccatggaggcgcgctcgccactgtgatcgatgagaacctggggcgtgtagccattcggcatttcccatcgcgaactggtgtcactgccaacctcgagctcaactaccgggcgccggtctactcggacaatttctataccctgcataccaccctagatcaggaacgaagcacagacaccaaggcatatgccaagtgtgaggtccgtgacatggcaggccaactatgtgttgaagcgacggggcttttcgttgtccctaagacactcaagctaaacatggttggggaatatttctgaaccgcgagaatattgatatctacgaatatgtggcggcctttttcgatcgtgtgacttcttcgaagcttcggccgagggttgttatcaactcaacgccggtatcccggtctcccggtctccttgaacgaagccaactggaagtaggaagctagcaaggggaaaacaggccatatacatgaattatttttgtataaatatgtgctatctgataacccctaacagatacaatcagcgtctcttgtacatatgacaaggttattaattcaatactcaaactctcccagcatttgggtttctggctatttcggggctgatccctattctggcgtaggtctccggagcagtgaaccaaccgtatcatctacatgccttctccacgttttcttccccgcatttccccagcatctttgccccagaaataccagaattatgagggaattgccaagctgcctcggtactttctggatttcaagcattcctatcccggctatctgctttaacgcgcattactccgtagcttgtcttcatttccccactctggacatttcctaacttgaaatacggaacagattcagtgtgctgaaatgaaattatattattgtggccttccttcgacactggatttaattatcaatatcgtatgcatttcagtcgaattcaattatatccaattttgttgacttggggccaaggtcaattccccgtgcttattttgtttaacattgtgctacccttgaccctcgcccatcatggcggactcaatcattcactcgagtcggccagccgacgagaaggctgtgatgcagcatgacgaatatagtgacacctcacagcatagtcaccgggtaatggctgggccgggctcagaggaagctatgcatgagtctgagaaggatatcccggtagggctcggctgcttaacctgtggttggcgacaatactgatcgtcaaaagatgacattccgtcggttcatgggtttcgctgccatggctttcctgtggaccggaagccagattccagtctacctctttggtatgtgagaaacaacatgaaagctgtgatataattttgatgcatttccactaggcggcatccctccctatatttatggagacattggtggagcagatcgatgggtctggtttgtgagtgcatacccattgaagtatagagctatgattgacgagcttctgttaggttcttgcaaacttgctcggcctcgccggtgtatgccccttcgttggatctctatcagatctaattggacgccgcccagtcgctattattggagcatccctcatagttattggaatgataatctgcagcacggtgcacacaatgaacaacttcatcggtttgtatctgcccatatgtcgcagtacatagacgttctctaacatggatacagcgggcatggccatcgctggtgccggtgctgggatcaatgaactgacagccctggctgcaacctccgagatggcgcccactcgaaagagaggagtctatgtgtcgatccttatcttcaccatcgtaccattctgcccgtccgtgctatgggctcagcttattgcatattacagccattggcgctatgtcggtgcgttctgtgctgcgtggagtgcctttggtctgctgatcacggttctattctacttccctccgccacgagtcaattcagctggtttgagccggaaggagataattggacggatcgactttgtcggtggattgctcagcatcactggtctcattgtcttcttggctgggttgcaatggggtggatatatggtatgcttggagataccctgtgcagggctacatatcttactgacatattaatttagtatccatggacatccgcccatgtcctggcaccattgatcgttgggttccttctgcttgttgcttttgctttctgggaaatctatggagccaaataccccatttttccatctcgcctcaagcaagagcctcggattctaggccttaccctcgtcattactttcatctccggtgccaacttcttctccgtccttatgttctggcccacggaatcattcaatgtctatggccatgaccccgtggaagtgggtgttcgcagtctccctattggatttggcatcatgacaggggcatgtactgtgcttgcgcttcttagtatacttcgtgggcataacaaggaactcttgatcgttagcagcgtgatgatgactgcaggtgagttttcttgatgggtataggagttcccaaaaagctaatctgttctcctcaaaacaggatgcggtgctatgtctatcggccgcactgataatatgtatcagctttggggaattctcgtccttgccggccttggaattggaggtattgtggtgccagcctcgattattaccacaatcatttgcccggacgtgagtcatcttgctagaagggaggaaatttgcctattgacattagctttcgctaggatctgattgccactatctctgcactcaccctctctattcgcgtggtaggcggtggcatcggctacaccatttactacaatgtcttcatctccaagtttgtccccgcggcaacacactacatcggtggtgtgatgatgaaagagctcaacatcaccgacgttaagctgattggcgaagcaattgagctgacaggtgcctcattgctaagcgagctacgcacaatccctggtattgctggcaatgagactgcttatcaaatggtcgtaggggctggtcagcttgcatatgccgaaggatataaatgggtatactatgtcagtattgcattcgggggtgtctccattgtggccgcctgtttcttgggcgacatccagaagtatatgacagaccacgttgccgtggtaatgtgagagcgtacccccaatcgcgatttaccaaaaaattgttcatttataggatatgtcttaattatgagaccaatacaacaaaattgtgattggaagatattcaagatagtagatatcaataagtagtaaaagggcaggccgccgatcatgacgcgccaagcccggcaacttttttactcgcaaacgtcaatacacgcaacttcaatcagcagccatggcatcccaaccttctgctaagcggaaacccttaaatccctcagttccgcatggtgcagccgggtcgtctcgtaaacgcgccaaaacctttgatgcgcgcaccttgactgtgcagtcggccgacgccgccctctccgcaacgggcgagctcgatgtcgcggcatactctgcggctcgggcattcgagatccaggctctggaggagggaatgcagcggtcgaaaaatgcgctcacgacgcgagccttccaaaaagttccccgctctctgcgacggcggacagcgagtcataatgtgaagcgagttccgcgaaggttgagggctcgggccaagcgagaggtattcattgacattgatctacaaagttccaataacagttgactaacccgctatttcaaccatgctagatggccgaggataacacacctactgtaacggcgcgcagacgcaagccatcccagatgatgcgcattcggctcgataccgcacggcggctgcaggctatcaactcgaaaacaaaggcccgacgggcggccgcaaaacaaaaacgggaccaggagaaccagacttccttggaaaaggagggaagtcatgccttcgatattgcgccacgagttcccaaaataaagaagaataagctatcgaggtctattccagcagagcctaagtaccgcaagcgccagcgatgcaagacatggctacctactcatttgtatcatgcaaagcgagctcatatggcgacaaccaaagacccgatttggcgttttgctattcccttatcccccaccgaaaaaagctatcggcctacgcaccgggctcgaggcgcccggggtgccgtggcgtgggatatgagctatatgtctactattcaggtggaaggaacagaaccagccgtccaggctgtcctaacggcagtgggtattgacggggacaatgcatggggcaccaaggggaagaaatggagagctgggactcggtctctacgggcctggacttttgaaaaagatgatcccaaacgtccgaccgcaccagtaacattgatatggtgtgccaagcagcaagatgttgagatgattgatgccgacgaacctcagcccaagtcatctaagaaagatcaccgaaaactctggattagagtccatccttcagccttcctccagctgtggacggatattcttggggtttccaaatcgcaaaaccccccggtcatggtcgaagacctgcgattcgagattggcagtattgaaatcacagggccagggtctaccgagaccttgttggcggcactgaaaccgattcttgggttagatggcaatgctccatcagcgcaaagtccggaggccgtttggccatctcttctaggggtatcgaacccgtcctcactgccgcctaattctctcctctcttttgctatttctgatcctcgcctgcatttcccgccacgaacacttcacgtcccggacaatgaatcccatttgaatgaccttgccatcttactttctacgtggcatccggacaaaacccaaggtccctctatgctgttcgaccgatccactcggttaagagcggctcgtcagcttccgagccagaaggctatcaaccgacgccgcactcttgccggtcctggtgaatatccgccatcccaaccatcagatcctcaaattccgatcatgatcctcgcaaacaagccacaagcccgggccaaacacagcagtgccccggggtcctggaccgtattattgccatggaaatgtgttgttccggtctggtattcaatcatgttctatccattatccagcggaggaaacccattgcttggcggtttgaagcagcagcagcagctcgccttcgaagcaggcgaggcttggttccccggagatttcccaggaacacgagctgggtgggcatgggaccaacgtgagactgcgaaatctcgacgtgactgggagcgacgtcctaaggggcggcgccccgaattcgataatatctcgttgggtgatggtcgtccaaagggcgagataggccacgggtgggcctgtgactgggaaaggcttcttcaagggccgaaacacgacgatgcttcaaaaattgccgatgtcagttcggacaaagggccaaccaagtccaaggaggccgagacccaggacccctctgctcccatcatcccacccctcaatattcacaatgttcgtctccctccggccgatagctaccaaatcctgagtaagctcgacacaacatccgtcgatgtctccacccttgccacggtctatctttctctcaccacgcgaggcacacccacaccccgtgcacgtatctaccgacttcctacggacccagatctacgccagaaatggcttgatcttggctcggcaacgatcaacaagtctagtcaatcgaagctctccaagggaggatctactgcacccgaatctgcagaggctcggcgtctccttgccatggctctcatctcacatgctgatggagagcctgactctgagccattggacgtacccaccgaagatgacctgattggatttgtgactacagggaactataatctgtccgaaggcaaagggacaggcattgggtctatccagctctcaaaggtactggctcccaatgccaagccttccgagaggagaatgtgtatcattcgggcctcgggggagaagagcgggcgtttagggatatgggaatttgtatgatatccaattcaataaaccagcagtgaatctgcccaactgtggtgttaaacactgtctgccccagtcacttgatccttggtatatctttctactggcagaaggatagccctcccaaaagttaaacgacaaagatccactctcatccatggattaactctatcctatccagatgaagacaaatggaacaaaagaaaaatgcacattctatacatacagtacagcagctccctgcccaaaatcaggtcccataaaacgtagaggcttcacatcaagccgctgtattcccgaactcaccgatctaacccacaatgcgatccacaaaagcagcctccatgcgtgcaacctcgcgcttgaaagcatcaacctccacccagcagttcaacggccggcggtcgttcaactgcagacagctggtaacatccgagcgggccttagcaacgccatcatcgagctccacaagcttcctccgtccatcaagcttgctccgcagctgctcgatctcagcagccacagagttgcgcgagacgtcacgcttgacgggccgggtagcgacagcggtctcctgcggcgcgatgactgtaggcgcggggtcgtggtggcggccggcgaaggggatccgcggtgcgtccaggttcagtgagccggctgggtagcccgaggtggaaggagcgaggggcgcggttgctgctgtgacgggcagggaggtggtgtctttggactctgagatgcgcttctcgatctcggctagggtttgctgctctcgttcgcggaggcgttgcagttcctgcgcgacgcggttttggatctccaattccaggactttggcgcgggtggagtcggtctgttcaattggtggattgtgagctttttggattgagctagggtattgctctaagccgcgttgtgctcacctctgagtttgattggagtgcgtcaactaggtttgaggagaattggacgggagagttgctgtgcatggttaggttagcattggccgtaggatgctttggatgagctccgcggtgtcgcatgtagtgatggcatcctgagagctcctttagatctactggaaccagctgcccttggcaattggtgccaattggaaggtagttcccgttctctccgccatcaagcatgaaatgccgcggaagctgaaatcgaagtcggagagcacatacctggagaacacatgttgtgagccagccgaagcctcgggcttagagtttccagcacccatttttgggggaatgtgacgagtcctgctaagatagaaagacggtgatggttcaagatgcccgctcacaacccgttcagttcggaggatgttggaggtcacgtgtttatgttagtcatcaccggccgggtcagttgctagtttcacgtgacggtacatacatctatggtcacatgatacatagtctggcatgtcaaggtcacctgaagtagttactgaagagggatatgcacgatgggcagtctagcctagcagacaagacgtttcattccgtgagtggtttctgggctagcttctctactctaggatttcacttgacatgaaggccccgagattatctctctgcctgaaagacaaggcccatactggaggattccggcttttcccactgcatacaaaatctactcacgtcctctaatcatgtggaatcaacatatcgttctccatggccgatatgagcgatattgttgatttcatctctccaaattccccggacctgtctagcaaagacagatggtctatatttgatccaggatttagagggtcatattaatcgggtttaagacgtagtattagacctagcatgattcaatattttaggttgttaagacctccaaaatgcatcatcgagagctcggccatattgactttagccatgaggaaatgatatgctattacccaactcttggttgtcaaatttcgtcaaatcaacattctttccgagacttctatatattttggtctaggcccacaccctcctaagtactacggcagaattgcaatcagactaacacaatacctcaaaggacgatagtctccgtgcggcaacagtcggtgttgtgggtagaaccatctttcttccatggttattttgctaacaccatactagagattcggatacttagccagactaatcaatatgaaaatgagcatcaagtactccgtaaaaaagtaatgtatgacatcggggtccggccatttgacgggccgatgtaacccgatcgtctctgtatctctatgaagcacaatatgcacatgcacatgcacatgctgtgctgtatataagcgtgatatggtcaactaaatatcaatgctaatgctttcaaatcacccaagtcagcatatacaggaacacacattagtggatgaatacggtgcaagatagcaggattatcccccgacgtggcatttgtatattcccgtcccctgccccggtcttagcctgtgtcgctcaccggggaagtcggggaaaatacgcagttcgaaagaattggccagtaacgacgcctccccgcactgtctaaatgtctcctgttcatagcgtcatggagcgaaaatctgggttgtgaatgccctaggaatgtagagactgctttcggctatagacaggatcccacgtagaatactccagaccaatatttgttgattgccctatagttcaaagtatgagattttgaagtacaattcaaaacaaagtaacatttccggtgaacccggcaattcccccgtaccttgacactacatcgtagatacttcatcaatagtggccattgttacggcggggagtgtactgccaaggtaccggactgacctcatggatacccccctccccggtcccctcatcccaccttatgttctgtatttcgtatcttgtttcttcactctcccccttttcttcttcccttcttcttcccaacctgtccttttccattcttttctcaattagccgataccttaactctctactctctgctcggctattctcatttcatttcttgttacactatgtcttctgcgctcttggaccaagccacgcgcattgcgcgcggctttgattaccccgccgagaatgtgcagcgcggggttgccgagtacatcaagcagtccaacgagggcttgaccaaagagggtgccactttgagccaaattcccacttttgtgactgcggtgccaaatggcacagagaaggtatgaaggcaaactatttacaatgggacttgcgcgctgattctccttgccatagggcctttatttggctgttgatcttggcggcaccaacttccgtgtgtgctcagtcctcctgcacggtgatactaccttctccctcacgcaatccaagatcctaattcctcgggaattgatggcctctggcacatcgaaggatctcttcctgttcttggcccgtcaaatcgaagcattccttcgcattcaccacaatgagcacttcgaggcccaccagctccgccgacaggagggtaacaacgaagaggacatgttcgatctgggctttaccttcagtttccccgtgcgccagtgtggtatcaaccgtggaacactgatccgttggaccaagggcttcaacatccccgatgcggttggccacgatgtctgtgcgctgcttcaggctgccattgatgatttgaatctgccagtgcgcgtggctgcactagtgaacgataccgtcggtactctcatggcccgctcatacacctcgccaggcaagactggcactttcatcgctgccattttcggaaccggtaccaacggtgcttacttggagaagaccaagaacattaccaagctccagcatatgaaggatgtccactttgacgactgcacaggcgagatgattatcaatgccgagtggggaagcttcgataaccacatgagcgttctccctaccacggtgttcgatgatgagctcgatgctgacagcaacaaccccggtgtgcagatgtttgagaagcgtgtttcgggcatgttcttaggcgaaattctgcgccgtgcgctcctatctctacaccaaaacaccgacctggaattcttcaaggccaacaagaactccaaggtcgtccttcctgaaggatctagactcttccgtcaatggggtcttgatacgagcatgcttagcccaatcgaggctgataacagcaaggacttggtggatgtgaagaccgcattgaaggatcacctcgagattgagaaccccagcctggaagagtgccaggctgtgaagatcatagttcacgccattggaaaacgtgccgctcgcctgagcgctgtcccattggctgccattctcgtgcacaccaacaagcttgagactgatgatatcatcgacattggtgtcgatggcagtctcgttgaattctatcccaattttgaagggcatattcgtgaggctttgcgcgaggttccccaggttggagtcgcaggcgacaagaagatccgcattggcgtttctaaggatggcagcggtgttggtgcagctctgattgcgctcgtcgctaacagggtcgatggccatcttaaaattccccgcgagaaataaatgacctgaactatcctatggttccctttattgttgtcttttgtttgtcggagctctccgattttcatgacctttaaagtgtccatctctctctccccagcgaagttgaaaactacgtaggttggtcgaccaccctaatgtcctcagaatctcagacctgccacaatccgttagtcccgaaacaaataccaacctgaattctttcatctttcgctcatctaaacctatggcaacactatcggctgaaatcaagattcagatcttgatagtcaattgccaacccgcaggactttcctacctgcgggtgagggcatccgcaattatcatatcacgccccattccatcaacttcccataacgaggttacatcacattggggctgaattctcaatttggagttgcggaggcttcctccgaggccttgccggcgtggaacggcatgcgatgcaagaaattgcatcgaactggcttcacacccattgtcatgtccatttcttgtctatttcttacttcacaatctcattgctttttaatgaatctctacaagtagatgaaccccaaggcggataatatcacaacatttagaccagttctattggcgttatatacttctgaagcacatcaaagtcccctatttagcatgctcatacccaatagcccgaggtgcctgtacaaaatcgatatgaccagctgggcccgtcaagaaggccgacttcccaccatcagtactcggatcatatccaatgagattaccggggaacccaatatcaaaagtagttgccgcctccaaaaactcaatctgcttatccgtaagccgaatcgacaacgcccggatattgtcatgcagatgctcaatcttgcggcctccaacaagcgggaacacattcggcgccttgcagagcacataggccaacgcaatagcagtaaccgactcaatcccatgctcagcagcaacaacggccaatgcctcggagatatgcttctcctcttccgtctgctcaccacccaccgtactacgcagaccctcgcctgccttctttcgctcctcgagctgtttagcagtctggaaatgcccactgccaagcacatcccacggcgcaagcgccatcccgaaatgccgcgccatggggatgatatcgcgctcaaagtcgcggcgcatcacgttccatcggccctggtagatggagaaaggtgttttgccgtgcgcgcgcgcatacgtgttcgccgcggaaacgacccacgccggcgaatccgaaatcccgaggtacatgaccttgccttgctcgacgaggatatggagggagtccatgatttcctcgatggaggtagtgtggtcccaccagtggaggtagaggacatcgatgaagtcagtttggagtttgcggagggagtcgcgaacgctgacgatcatgttgcgcttgtggttgccgcaggcgttgggggcgttgcccttcccgagcgcgtggctgcggtagtcagttgtgaacttggtggctagcacaatctggtcgcggttgttgcgtgcggccatccattcgccgagccaggcctcggattgttcgttctggtagttgtttgctgtgtcgatgaagttgccgccggcggcgacgaaggcgtcgagcagttcaaaggatttctctttgctcatgctacccatgaattggctccaggcgtcgccgatggacattgcaccgagctggagcggggagacgcggactcctgctgttgaggagaggacccggtaccggcccagaagggtggcgggctcaggggcagctttgaagagttcgtccattgtatagtaggtgtggtgttttgtttgttgttatgtaaatcgatggtggtgggctggactatcattcaggtcggttggagtgccttttatacttggtctttaccaatcaagcccggagataataactcggtagtatcggctatgtttgtcagcctatttcatccattgaccttgatgaccggaaataaagctccctcgtgatatatctccgttcccacaatttattgctcgtcttcctgctgcctcatacatagaccctagataagtaggcacataattatagccaatgatcaagctctacgtgctagtacagtattttgtaacgccaatcggttatttatagtgtatgaatccgtagcgccgcccctccctgtgggagacaggaaatggatattccttaaatccttaggggtgtcgagctcttgaatcaaggcgaagactactcagacgaaaaccttagaatagctatatagtgccagtatagatcagctgagcccatgccgatgctggctctaatcatctaagctgttagaatggcgagtatagccagatgagaataatcatgatactgtgccaatagtgttctacatcatagaagtatgatgaccaggaaggacaagcttaaatccgatctccgagttggttctttggttctaagccgcactaatcctaatcccgttagagccgtgtcagctgtctatcgttgcatattaacgtaatctccgcaactatccacgtcgatagaacacttgtttctggagtaaacccttgatctctcttctctgggctgttcggaccctatgtttatcctttgccccctgattcatcaacagcggtgtactcagtaatccgttacaggatgtttctctggatggagcaaggggtgatgttatgcacatccccctgttcgttgattggcgagcaatcaacatttacacgacagccgaataattgatcaccctgatccttgcattcccctgactgcaactccacctaggcaaaccgaactcgacatcttgtccgcgttcaagcgcacgttttgactcaaacccggtgtcttttctgacggcgcatgatgttcaagtctactgcgactaattatagttgtatcaccgcattttcggttgttgctattgacgaaccaatagactaatcccttgagaactagatctcgctgcctaactgcaaaaattaaatcggcagggtatgcagctcggcggaggattccatgtaccacatggactctcgaaatacgatcgcagggttctgtgtagcctggattggtccttttctccttcccaagaaatttacaggcaaggttcttcatgagacctgtacgaactggttgtgtttccaatgtcactcttggcttattttccctgtttccttttaaatcgctatgttttcctgctcttcattcgtcccaactttcgttaaatctcattacgggcttttcccctacttatttaatacttgtcttttttttcgttcattatgggcttcctcaatgccttcaaagctaaatttcgcaaggagggagatgtacctggagacaaaaccgagcacaacaatgagcacaaaaatgtggcacccaatgacgacacccattcccagtctgaaggtcagacttcaaagcctccaagtgaaaaggagagcactctagtcgatgagcctttgatgagaaatactactcccaatgatgacaccaagagtgaacttgcgagccgtaataatccaacgcctgttcacaacgactccaaccgggagctggtccccaaaaagccattcgatgagcagcccacagaagaagaaaaaaaagaggacagtgacgccgaaacgccggaggatgaggaagaatatccaaacgcatggagattgactatgatcagcattgccttgtgtctatgcgtgttctgcgtggcattggtacgcactgccaggctgctttacttgatgattatatccagctaacaccgatcctccaggacaacacaatcatagcaacagcaattcccaagatcactgatcaattcaactcactcgaggacgtcggctggtacggaagctcatatcttttgacaacatgtgctgtgtccctgatgttcggcaaactctacacgttctactctatcaagtggatatatctcagtgcgctctgcattttcgagatcggctcgctcgtttgcgctgtcactcccacctcggtcggactcatctgtggtcgagccatcgccggcctcggagcggctggtcttttctcgggctctatcctcattatcagcaagagtgtacccctagtcaagcgaccgatgtatacaggtcttattggcgcgatgtttggtattgccaatgtagctggtcctctgtatgttgctcctgttccttgattgccgaattatgctaacttctgacaggatgggaggcgcattcaccgaccacgtcacctggcgttggtgtttctatattaacttgcctatcggagcagtgactttcctcttcgtgctatgcttcttccaagcacctaaagccatcttgaagaagaacaccttgagagaacagatcaaggagctagacctggttggctctctctttttcctgccctctatcatcagcttgttgctggcgctgcaatggggtggtaccaagtatgcatggggcagtggacgcattatcggcttatttgtggtatttggtgttctcggtctcatcttcattggggtggagatctgggccggggaccgcgcaactgtcccaccacgcctgattaagaaccgtaacgtttggggctcgacatggtatgcccttgctcttggtgcttctttcttcgtattgaccttttatgtgagccccctttccgtttctttcttccgccgttcgctcgtcaagctctaacattctcagctccctatctggttccaatcaatcaagggcgcaaccgccttgaaatccggcatcatgaatctgcccatgatcatcgcagtcgtggttgtctctatcctggctggtggcctcgtcaccacctgcggatactacactcccttcatgatcgcctcggccatcatcatgaccatcggcgcagggctccttacaactctagagacagactcaaaccactcaaagtggatcggataccaggcaatcttcggtatcggcctgggtctgggcatgcagcagcccattatcgtcgctcagactgccctgaaggccgaagacgtacccagcggtacggctatcgtcatgttcgcccagactcttggtggcgctattttcgtttccgtcgggcagaatgtgttccaaaaccagctcatccggaacttggctcagtatgcgcctgacgaagatgctgcgaagctcgtatctgttggcgctactatgctgcgcactgttgttagtggcgattccttacaccgtgtcctggttgcctataatgctgctattacgcagaccttctatgttgctgtcgccatgggcgcattgtcgctcattgggcccatcttcgttgagtggttgtctgtcaagggcaagaaggtcgaggtagctcctgtttgaggatcaggttcggactaggcaagtcttttcgtgcacattgttcaatttcttttctttatatcttttttcccccgttctttgtggaatggtctacggaatattgtactgggccatatatgtgtccactcatttctattgtttatttataattcatgcgtatattgatatcgcataaaaagcccaatcaataccattgctttgcatgatggaatatatgtttcttgatgcttttctatttctcttctttcaccacctattgtacgcagtcagttggggcgagagcgaagcggctgtaattctattagtatccaatttcatagggttcgatagtcccagttgtcatcaaagtctaacctcttccttcctatttaggaacaaagttcatgtcttacgtacaccttgcatagagagattgagggatccctggttgtatagatataaggttagcagcaaggaggtgatatatatttttgatatcaacggtaaattgacattgaactaagctttattttgttcggccttgggtgaacccctttgacctattattgtactaattccttcgataatacgacgctgaaacagcaaaaagaagcaaaatgacacacaaaacctaaactccagcatataaactcaaataaatcccccagatcaccccacacgcacttccaaagaccactcgtcgatctacaggaatgattgtgtacattaagaccgaaacaacaggccgatacttcagacgggcactcataagaggtcgaaaatcctacagaagtcagcatctgtgtaatcagcattgttcaacagaagggcaacttaccaaaacaaccaaatcccacgattttgccaaactctctcccttcagcagattgatgataaccacaaatagcacaagatttacaattgaggcagccgtctgatcaaacaaaaatttcatgacgaagctatgcagcccagatgtcggcgctggcacccattggacatgcttttctttgtctttgtggctagggagcgaaacatcccggcggaatcttgaaaagacagaaagccatgagcggggtgagaacagagatttcagcgatcgagcactgaatgcatttgagagttcagcacgcgtaggaaaccctggatagcgcgactccagggcgcgttgccagtagaaattgggggccacgattaagatgccataggccagaaattggaggagggccagtgtatttagagtaaatggagtctaggactttgtcaatgttgtcatgagcatagaaaacagaaatttttcttactttgttgttgcgctggtcaatcagctgcgcgaggacattggagatagcattcaaaatggttgcctgcacgaacgtcacaagcaatggtgagggcatggtgagaaggccccttggaccaaatccatgtaaatatcaatgttcgactgaacacaaatagaaaggttgaaaagggttgccaagcgcaaccgtgtcctgagaagtcgcgaggttaagggggcaaattaaggctgagagattaggcgacaactttgatgttttccactttttacatcttctgcatcgcttattgtcttgagtaacaacttgactaaattatctccgtcgaaatacaacattcggtccattcttcgccgaggtaaaatgatcggtcagcgccaggtgcccccccgcgtcttcgccctgacgatcggccaatgacatgtcaaagaggaacaccagccgcgccaatgttagccgcatctccataaaagccatgctcttgccaatgcatccacggggcccaatactaaacggacaaaatgcgtgtcgcgcagtctcaatgctctccttggtcgtctgccaggacaatccagagcccatgcaggtggcgttctcaatccagcgctccggcatgaaggtccctggttcccggtagtatcgctcttggcggtggatggagtatgttggtgtgccgcagtctgtaccggcgggtaggaacacgccgtcgaccacggcgccaccttgcatcacttcgcggggaatcgcaccgggcaccgctggggccagacgcaacgcctcgtcgatgcatgctttgagatacaccagttcgccgagctgactgctggttatgatctcttcgacttcgttaaaggcgccgcgtacctcggcacacagcttggccaatgcatctggtctacgaactaagtagaagagtgtggctgccagtgtagtcgaggttgtatcgctgcccgcaatcatgaggacgttggactcgccccaaagctcgggcgtgctgagtccattgccggtctcagggtccttcgcgttcaacaggtaataaaagaaatccttcttggcgtcccgaccaatctgggtacgctccttagcgcgctcgttggcttcaacacgcgaattcataatgaagttccatcgatcgcgcgtcagcttgcggatgaatatctggtccagaccccatgtgtccaggggcatccaaaggccacactatgagagaatcagatgaattgttccttgacgatggataaaaaagaaatgcttaccacataatgcctgttcgcagcacgatccaccaacccaactttatatctcctcgtctcagaaataagcatgtcaaagctcttcccaaagcagagctcgcccatgacatcgtacgagagatagctaaaccaatcacccatgttcttgacattgcccttctgatcatgcgattcgaaatccccgtcatacccagcaagcacagcacacagctgacgcacatggaggagcatcacatcctccatccccttcagagcattatcagaaaaggcctggctaagaactctccttttgcgaccgtgcatggttttatcaatagcgttgtgcgtgttatacacgcccttgatagcagggaaagcattgtaaaaattggccttctgaaggcgtttcccgtgcccatagatatcgtgtaatccacggtcagagttgacagagatgaaattaggcgcaactcgtacgtgtgtcccgtactgactgtgcagcctgtgcagccagaggtggcggtcgcccttcaggccatggtagagctggacccagggtgtgatagatgcgaggaaggggccgttgatacggcgaagtgggtggatgaagcgattgtagagggtgtaggcgatggtctgtagtcaattagaagttgattgggggtatcaaaagaataggacgtaccgctactgctaatagccctaccaagcctcctaggactctttgtagagaaaagcaccccaagaccgattcaacaaacattttgtgagatgatcatgaaggaataagcatagattggctaacatgttacatatcctgtccaacatcctttatactccagctaccgccgatacccgcccccaaccgaagctgatagtcaatgatgacggatccgtactacaaaacaggtcggcctttgctccaattaagaattgccaatttctactacggatagggttctgttggctcggttataggcggttgttttaggatacattggagcgccgttgattggctatgcttaaatagccagtatctgcggggaagcttcacgtcggggtacttttgtggggaggatcctgggtttctatgttctaaggacaaaagaaatgaacttttcaatctgaggccttgtgaaatagtgagggttcattgtcattaatagtcacatagaaatgcgacataagcgatgtatcttttctatttttggcaaactgccgccatacagtagcatcccctgctagcagatattcccctccatcggctccactggctacatatatttctccaggtaagaatgccaccgttattagccgatttacagtgggtaatcagacatccgctccgaggatgccgcccttgtcaggactcaggaatgcgtcaaacacagtcaacatgcttttttttttctcgcatgaggctgtcctgcaacacttatagcaataatgaaaccgacggtaatccctataaagtgcctcccgaggtggtcgatttagagttatgcagacggcccgaaatggtagtttctgaggctcaagcgttggaacttgatgaatccatataagactatgtttgagtggtgtacccatgtattcctccatccagaatccactgctcattgtcatcgttgtcatcttgcacacgtcgccaagtctgttttcgttcggtttgctccgctgcttcagcttgctttatctcgggggcacgccacacaggtcgcatgagaccaccagccgcgagaagggggttacgactgaaagcaggttgtcctcgcgagctgtcctctgcacctccttcctcaacagggtcaggctcactgacctctggggttgattctgccggcgcagaatgatacactcggcggaccttgccacccttgatatcaagactcatcacggtcttcttcctctcccactcaggacgagctttctcgtctatctcgcgctggatgcgctgctgctttttgagcgccagtgctcgttgtgtgggtgtcatccacaacgtcgaggcgacatttggggtctcgaaatctgctgtttcatcaacaaccttggtccgacgggcattttgcgcttggaactggagcagcttgtcccggtgtgctttcgcgacatccagtttgcttggagcctcggacccggaaacaggtctaggaccgccgtcatgatgaacaccttcattgtgtacgcgcatcttctcttgtccacgctccgcccgtagttcccgaatcatgccttgcacttcctctgcggagaggagcggtgtgccacagaatgagcacggctgtagaccctcaagtgagcagatgatttttccgcagttaaggcaattgggtgccgggtcaaacactggatgtagtaacccgtagcaggagcatttgcgtttctctcccagacttggattcgtcgatacctccagcgcagcgatagccgcggtgaggtcggagatgtcattggttgtgagagctgtatttccctttgaagacgatcccgctcctccgccgtgacgtgttgacttgctcacttttgatcgcacatttggtaacatgtccgagatcgtagggccactcgccgatggtggtggcttcggggatgacacgggcaagggggaggtaatgcgcgccgaggctgtggacccacgcggcgatggtgcaagagagggagcagctggttttcgagaagacatatagtcttcttcatcggctttcttgtagccaccgcctacatcgccgtagttgtcgggtcgacgtggtgggccggcagtgtgcagcggagccttcttcttgcccttcttggctcctccgcttggccttgatacatctctgctttgtgtggaggggttctggggtggtcgctggggttctcgacgtgaattaaacgaggagatgaattctagggccgccggggagtcaccgaggaggtttttgagatggtcggcacattcctccctcgagaggctgagcgcatagtcgataacctgagaaagagaatctggatccagcgggataagctgggaaagacgaggagctgcccatgcagtaagatcagccattttagaaaaatatttaggcgttggtgaatgacaggtgaaatgcccgtggatccccgcatttattaagcgtccccggtgcaacccacccaactacataggcatcaagtctctaaacacagtgccaatcaatttcaacctgttctcggaataattacacatccaatgttagtggacatttttttttcaagtgacaaaatgggatcaggtagcgtacatgttaagctggaatccaatgagttcaaaattaagaaaagaaaatattgatattagcacaaatcagttgcatatttcttgcagtgcctctgtcggttgtatctcatgttgtcaagtaatgtacaaagcccacctccctcgtcatcattcatctatgcagatttatccgaaggaaaggccaaaccatgaccagaccaaaccagacccagagacgccatggaacataaccagcccatcaaaaacaaagctcaaacgccgcggacaccatggtagagaaaaagggtatgaaaaacaaatgaaagtttagtcggcgttctcgctcttgatgtcgtcgtcgttgtcttcaactgtgaatgattgcttgagcttactgggaccgggctttttgctggagccctttttgggtccattcagtttcttcttcttggtggggctggggctttcttcgtcctcgtctgcgtaagggcgcttgggtgctgatgaaccgggactattgccattgctagctcccccgtctgtgggagtcttattgcggccgccggtgcgaccaccacagacgcagcgttcaaggtgttgggcgagacgagtcatgacgaagtagcgcggacagataggacacttggtggttggaatttcaggaatggtactgtctcggtcacccttctttttcttggggttcggcatgactgcaaaaagcttgccgtggacatcatggccgggcaggtcaatcatggggacatttgtacagtactcaacgtggggatcgggagggggcagagaattagctccggtggtcggatacatgagtttcgggaggcggcaatctgggcacacatgctccttcacggttcgcatgggatttcctttgaggaagacttttccacggctgaaaatggccgcgtccgtctccatgcgcatacccgcaagcttcttggtgtcgagaacaacttctctcttagtatcggtcgaggtcttgctaggtgcctcctccggcatgattgcgtcttcctccgccttctgtcgggcaagaaccaccgcggaccgcatgcgcgccaccttctcttcgcggtgaactttggccacaaggtcgtggatgatattctggaatgtttcgttcaggatgtcggtagcctaaaaaaaaaggcattaggacccgttatgaattcacatcaagttcactcggggccatcataccactttagcgatcgttccggcaggataggtcggcctgcgaccaccgctgctgttggagtcggccattttcggattgcggccggagatgaatgcgccaaatatatctcgtccggacctgattgaccgacggctgtgtctgcccgcgacacaggtagtgtgtgctccgaaccgctaggtccgaggtttagttctccatgtactggaaatctatgcagggttgacgcaatgggtgcacggatgtaggagagaggaagagagaagaaatccaaaacatagaagccgaaataaaagggagaaagaagacaataaggagagctgaattgtatagcctagtgtaaggcctgatgtcagtgagcttcaataatggggcgaggtagaattaatagccagcaacaataggggaagacaatgtgatcaatgcaggtgttttatcaacgcatacaatggcaagcaggcatcgagaacaaatagggcactaacctatagaggtgtctatttgcatgcgaatcaaatatcactcggggagatgaagagacggatgaggctggagcaagttgttcactgggcttatcttatcgtatctccgcattcgctgcccagccttggaggtgcctgcccaggtggtttgttctttcacaaacgacccctgaatttgctccaagatggcataccagctgtttgcaaagaatcagacaaggcaagcgacttcttcgccgtcgctctctcctcctccgaccaatcgtcaccccatgcggcctcctatccatcctcctccagtacagccgcctcaatcagccgtcgcaaacacgcctggcccaaaacattcaaaagaagagatctttgtcccatatcctcatgacattccagctggtgtggcgacaaaacacccccatataactgtcgagaaagtcagcaccgcgcatatcccttccctgacgcggatcacgggtttactccttcccatccgctacccaaactcgttctacacagcgatcataaccgatccggtgatcgcttctatttcgcgggttgctatttaccatgatcaccctgttgctgcagccccggggtccggcgcatctgccgggacggacaaggtgatagggggcattcggtgtcggctagagcgaatccggcaggcagaggactcgatcaaagaggccaaaatacaagggaatggatgtcccacgaatctctacattcagactctacatcttctctcgccataccggggccgtggcgtggcagcatcactgttgaattcgcttctatttgcatcgtcaccggacggcaatggcaacgactcataccgggtatccgagctcgtcaggcactacaatatctgctctgtcacagcacatgtccatgaggcaaacgaagaggggttggaatggtatattgcgcgtgggttcaagattgacggtgatgtagccgaatactatcggcgattgaagccgtcgggtgcgaagatcgtacgactagatttaaacaggaatgagaaagatgaatcatctggtccgacagaaagcaattctcagactacagattctcccggtgaagtagaagacgaagactgggagaaggtggaggcggaggatggcgaagaaggtgaccatggaatacagcatttgaacgaatcgcaagtccttgtatatcaggatgcgccttcgcgcaagcgcaaggctgaatatgatgaccacaagcctcacctcgagtgagatgtgcttcgcatgtgtggctttctgttatacctcggataccccttgcatttgtttatatatctgatttagaatagtgcttgtgtttattcttaatgcgtgcatgatgatatttagttgaatatgagagaggatcgtgacatacactcctacgtgttggagttgagcattaaaggaactggcataatattcatataactgcaacgccatgggtatcaaatcaatagaagacaggaacgctacattagatattatagttctcggcatgcaaaaatatctcatctttcgacgagtccataatcacctgcatctgcagtttggctaccgtgttggcgacttcaactcgcatgctcggtggaccgcagacgaaaacacacgcacgacggccgaaggttttggaaaactcgttgaccatctgcgtgatgttcgggcggaagtaatcagtccgccagttatcacgtccacgtgcgtgataataagcaaaccgtggtgcatgtactggcggcggcacaggttgagatgcgccgagtcggaagtcgaaatttgaggtgccaccactatttgttgctgcggggctgtgaaggttcatgggaggctggtagaattgacgggtactgggcacatgggttgccatgtacgcattgggaagagcagcgacaccgtcttcattctcacggcgcaattccttttctatatcagggttgccggcagcttcatcgcgtatataagccgagttccgcttatcaataccctgaagcataccgtaaatcttctcctgtactatgtcccgtccaatttggtcgtcttgcttcactccggtgaggaagaaatgacagctcacaatgttagaaggtgcgtagtcacggcatattcgtagttcctcctggaaccactccatcatctcggggttcttgagcgcccaaataactttgaccgatttggtgatagccttgccatctcgaatcttcttgatgaggtccagaagttggcttgcaatggcagtaatgccacttcctccggcaaagaaaaccacgtcgtcgaaagcagccatctcgcgctgcataccaccgtatggcccttccacaaacgcgctgtatattttgtaggggccatgttccaaggctttctggaatacctcgcgtgtgaaaccttggaatggccggaaaaccagtatcatgtcacgatacttttcaccatacgcagatgggaagtcgtcgctgcaaagagaggcaatcgtgaaagggtggctctggatcacggaaatccttggtagtcgcaggtagacatactgaccaggtctccaacgcatctttgtgggaatggtgatctttatagcattttgcggaagaagggttatggctgcctcttctccgatcaaaaatgacgaacgcaaaggatgtgtccagttcaaatagaacagccggacgagatatgagatgacccaaatggcaagggttgtgaaaaggtaggcccatgatgacaggtagttcctcgtgtgccagaagagcattgccacaaagatgtacgagactgggatatggacaaagacgaaaagctcatacatccaattgcgaaagactggaagagaatggatacacaacacaagcagaggaaccagcgccgcaattccagtgccatatacataggcgtgtggtgggatacctatgctatagttgaccaaagcaccatcttcccagattggagtgatgtaaaacgggaccatatgaaccaaactgaggaagaggcagatataggctgaccagcggtgcagtccatttaaccgctcaggacctaggccagtcatcatagtgataaagtttgccttggtgctgagcgcaacaatccaggggatcatagctactgcaagcatgcctgcccggatagcgagcggtggcgaccccagcgcaattgaccaatagtataagggctgtggcacgaaacagtataaaacaacgaagacaaatgcaaccaagacaatcgctgtaaccgccaaagacggcaaaacaagctctatgttcccaaccctcaggacgggaactggtcggtagaagatccatcgcgtcaaagcaattgccttgttcaagggaactattcttgcaagaatagattcgtgcctcttaggtggagagactacggtcggtgatggaaagaattgggcgttggaagcatcagtgcctgcactcgggagctcgtactcgtccggtaccgagtcgtcgcggaagatctctggtcggttttctttatagagggcaatccgcatcttgtcgccccatttatgccagcatcggacgaaagttgtgattatcagtagcacgacggcgaaatagacaaatccgactccatattttgctgactttgaccatggatctcgctgcatctcagccgcctcggctgtagtcgtcgatgcagtgatcgcaacattgatgcgcttggcaatagtgctcagcattttgaaatgccttagtcggtaccgatagtgatatcttcctgagatttttctagtcagatccatcccaagaaaagtcttgcacggggtaacctacctttaggtatcacccacgcataagaggcttcctctcttatactatagtcgaactgagctcatatctttagtagagctatcaatattgatttcatcaaagtcaaggcaacggaatgggagttttcgagggaaattccgtctaaagtatgaaaaaaggaagcggggagtcacacaagcttgcagtctcggcactgtgatagcctaagcccaacaacggaatattgtggctggtcagacattgacccaatcgaaatcggtgattgcagaccaatttctagagcacaggcgtctcgccatggtgatagtggttgcagtgcggagggatatggtgtgacggtttaggctttagcgctctgaagcccaatcacacggggcgatatcagcaacagagtgattcgatgtgactgagccgcattagcgtggtggagaagatgcagagctcattgatatttttgtcgaagatgctcatccaattataattgaactatgatgcaggtatacaaaatagttcataatctccggctggtcgtgccggagattagccgaaattatggaagccatcacaactatgttgtatgtatgaataggctctatctgggttagcgtctatgactccgtgaaatgctatagcgcgaatagatcgaagaagctgtctatgcggactacatgtagggtttagtagccgaagcggatagcaaccagtagtagaatgtagttcccttgacgatgaactcacagtgatatattgacgaattgtaggaattcagtactggaaaaccagaggtttcaacatttcaacattctcaagactgtcatttccggcattggagctgaggcacttcgtcggttcctgcatcaaatggttttatcatgtagtatacagcagatatctgtcgtataatatcgtgtgatatccagactgaaacatcagacacccctttatctagaaatttgttcttgttctcttctcataaagttgttcctccagggctgctgtgaccccgcgaaactcttggcagataaacagttggtgcctggggcaacagtgacagcttcgaccgccttcgataggaaattattctgccatctcatgcttgtcggctttttctgcatcttcgatcatttccatatcagtctttgacgaaagtagagacgtttcatttagccatggcatcctccactactgccagtaatctgacacctccgtcattgtcccttccaccatcacaattcgctcgcctccaacctcacgcctaccttctcgcccacctctctcctccaccagcgagcaatcaaccctcaatccgcgcgaacggtcgtgtcgcctcacaatttcgtgtcacatccgccaatgccggctctctaactcacacaaacggcagcgcagtcgtacgaatcggcgacacagccgccgtctgcggcgttcgcgcagagatcctacacaccaaggacatcgcttcctggagcgtattgcaggcctcgtcggagcacaatcttgacaattcaaattatgcgggagtctccgagtcccaagatgaggaagatcgaggtcatattcaagatctgaacctactcgttcccaacctttccctcagcactggctgcgcgccaggctttacacccggtgcaccaccttctgcgctggctcagtcgctctcccaccaacttctttcacttctgcacaccacacgtctcgttcgagcagaagacttgcgcatctggtatcagccaccgaatctggagtcagaagaattcggcaatgcgggtgaggggatggacgtggatacagaagagagcgggggccccgagcgggagattaaggctttctgggtgctctacatcgatgtcatgatcatttctctggctggaaacccattcgacgcggcctgggcctctgtcctggctgcgcttcgggacacgaagcttcccagggcctggtgggatgccgataacgaaacggtcctctgctcggacgatgttgccgatgcacgaaagttgtctctgcgtggcttgcctgttgccagctctttctgttcgttcgagggcgacgccgctgctggctggcgggcggttgtcattcccagtgctgaggagcagaagcagaagaagagcgcacagcgaaggtggattcttgcagacccggatggatacgaggagggtttaagtcaagagcgggcttctgttgttgttgataaagagaatgggaaaacggtcattgtgaagatggagaaacatggtggttggactgtggacagtgatgatctgcgccagcttgtggatgtttctgctcagagatgggatgagatgaagcggatattagatcaatgctgatcgatttgatatgccttacaaatgaatgataccactacaagtatttcttgacattttgcttttgggatggagctgtgcatcggactagatggaaatggtggttgtcatgtgaatagtctacaaaatattgaattgatcacttcgctagtttgctgaactcttattcatcatgctgcgtcgtcttctcttcaacggcggttcgttgtccccattagcatccctagaaacagacacctctgcatcctcttcctctgtggaagttgtcggcgaattgaccagcatttcacgtttaggcttgccagggattgatacggtgaaggagatcaggtccgcgctatcacggtccttcttgggcttcttcgtcttggcattacgcccgccttctttcgatgatttcgtttcagatttcgagtcatcaatgttctcttctttgactttcatagcccgcattgcattctcgtcttttgatgcacgcaggtagtcaccggagaagatgcgcataaagaggctcttctcttgagaagaaggcttgtcctcggcttcattttccttcttttcctcttcaatgtccacctcctcggcatcagagaagtcccacattgtgtcaatctcacctcgaataaacgcagtaccccagagcgatatcaaaacacccggtaccaaatagagaagagctggctgagcatgattcgaatattgcatggcaaggagagtggtgaccattccaacaacataaccggctatgctagctttaaagtagatctttggaaaacaccgtgcatcatagtagggaggctgaagttccggctggagtggcttgactggtggcgcccagaaccgctctccccaagcgccgattgctgactgatactcaggcttgacagttgcttggtccgacctttcaagacgtgccatttgagcgcctttccgctggtaataaaggaataggtcgaagcgtagtgacagcccaatcatcattcccggaatgacaatgtcccccagtccaagcatggccaacggcacagagccaggagcatcacgagaggtgggcggccggggaaacaggagcttgatcggtacatccaacttggttgcaacagtgaccatcaacggtgtgaagaagacaaagtagatatcatagaaaaataaggatcccataatgagcgttcctgtccagaacgtggagggagacatgaattgcagggcgccatagcagaagcagaaaccgaggaagttggtcaaccaccatgggttcgccacgaatgcaaagtatcctaccgccgacaatgcaagacttccgctgacgatatcaaggagaccaacgagacatctaaagtcaaataagccacgtatatggcctcgcacctttagacgctggtaagagacatttcggcacttccaaagcagtcctaataccatacttgggagtagcagataacccaaaatcccaggaagaggtgaattccggatagagtgtgacttggctggatggtcctcggatgccatgaaaaggtgttcggactgtttcgctttccacaatcgtccaccttggcgataatatctaggaaacacaaatgaacgaatcatcaatagcacatccttcaggaatgcaaaggcaaagaagagtcccatttgagagaagtagaaactaaggatcttgttcaagatggctggatcttccagccatttgatcaccaagtataaaccacccagggtgagtcccgcagtcaacgggaatatcagggcatctgatggctcaagcccttccatcttctgcaaagggccatgtccttcttcatcatccgtgtcattttcatctttgtccttgtcgctttgtttcttcgcgggtttagcggcggaagaaggtcttgtcaaagaagcatgtgcaccgatccaaattggaaaaagagcggaaacaagtaggtgtccgtaagttggaagaagtggtctcagacggtcgaagtggtagaaggcttgtccaagaagttcggcgacagggctgacgtcggccatggtggacagaaaattgttatgagcacaggaaaatgataggcaattgaagccaggaaacaaagacagaatgaatcagaccataatgcccacgaaatgtgggaattctttgaggttggttaccagcgcttagtgaccaggcacaatttaattcaccgctttctctgaagatccctacaacatcatcgtgccaggcgcccaaaacacatgccgtgtgttggtgagccccaatcaacgataattttcactcaacgataaaattacaaaatcaggtagcttttgtatagtatactaaggaagatacaaaacctcttccttttctttaactttgacaattgtaaattgtagtgtggattattgaatctatagatagggcggtactggttttctgccagacaaattggcccaatggggtcgctgcactcatccgtatcgttggtgatttcgtttctcgcaaactctcagctctgttcctcggctcttttatttacgattctacgctacatcctcatcatgacaactgaggtggcttttgacacgtctatggtaaattgtacttcgttgttctcccaatcacttactaacccatagcaggggtccttctccgtggagctctacaatacacatgcgcccaaggtatgagctcattctatagctcctagagagtcctcactaatgtctttctcttcagacatgcaagaactttgcaaccctcgctgaacgtggctactacaacaatgtcatcttccatcgcatcattcctgacttcatggtccaaactggcgatcccactggcaccggtcgaggaggcagctccatctacggcgagaaatttgaggatgagattcgcggagagcttaaacacaccggcgctggaattctgagcatggcgaacagtggaccgaacaccaacggcagtcagttcttcatcactctcgcgccgacaccctggctggacgggaaccacacgattttcggtcgagtgaaaaatggcatgagagtgatccagcgtatgggactggtcaagaccggtgcggaggacaagccagtggacgagttaaagatcattcgggctcgtgtagttgaagcaggcacacaagagtgaacgtcgtgcgctgcagcttattccatcggattacggtggagggtcatgcacatcaagtatcttctcttgggggaaaaaaaacaagtgttacccaatttgtgcggtgcagttgcaggcacaaccctcggcgcgcccggcccaagtcatgctagagcagcattgtcttgttgttgtctcgaggtgctctatccaagccccctggactctacgaactacaatatcagagtgacagagcaaggtatcactctaataatgagattatggatgtatcactacaaaacgaaccgcttctatcaaatgtctccatcaagagcagcagatacagagtgacaagaaatcttatctaccactcccaaacgaagtccagtgaaggactgcgtcaatgaagaccaggctaccatagtatagtaacccattctgtgcagaacaccgggagtggtatggaaggagaaaagtgttccgccgaaatttctgttcatatagcggtgtagcctaacctcttttggaactgctgagtaatctatggtctcacctaggtagttaagcataacttcccgcctgaagcagataggctctatttggttcggttgtctctattatcgaagtaaaccagcgtaagcatcatctcctggtgttggtagctacacataagatagagcaaaaaataaattccgatatcggtgtgggtggctcgcttacatcaatagaagttgttgcgacaatcattcatttttcatcttcccccttcttgatcgaggagatagaggatagctctgctcagtgccgctgaatgacactgccatggtcttcatcttcatagttgcattgtaacgactgaccgtgcccgtccgctctgcgaaaggcgaacgaacatctggtcgcaattatcacccatgagacgttttccttgaccattcccaaccgtttatattctttcaatgaccgggttttcttaaagtatgcgaaactgctcaggttatctatatgccatccaagctttcaactggtgaagcgattctagtatgttgcagaatagctcttcctcctgtacacctggagtatatatattttcagaggcatcctaaactatccaactcgtagacaaacagagaaaagtcaatgtaggagatactcaaatcgtataattcccgtaccattcatgtcactgatgaaaagccgagttcattttaaccacgccgtacatgtgttttctttatgcaatgttcttcgacgtcgattttagtcctatggtctctaagtggggactaggtgaccgccttcgctcacttcccgcgtttttctccttcaatttttttattctcttcttctttccccccaaaactcaagtttgtgggatttccactgtttgagcttattggaagactgagaatgtttcagtggcattaaataatcatctcccaattctcaacctcctgagagcttgagctgccaaatttggctgtaatactcaaacttacctgcagctagagcttcctgattttcataccatggaaactctgtcagacacgacttgggatgtgatcattcttgggactgggatttaccagtcacttctggcactgtgagtgacttttctagggtggcggtgagttgagcactcacactcccaaagggccctctcacgatctggaaagaaggttcttcacatggactcaaaccagtactatggtggttcagatgcagccttcagtcttgatgaggcccagcagtgggtagagaaagtcaataaaggtgagttaccctttttatggctggttggctcatggctaatattatgttgccaaatagacacacatatatcaccgttcaaagatgcctcaatcttcaaacaggatgcaccccctttgtccgatgatacaagcatttctcccaaacttgcatctagtcgtgcttacactttgtccctgtccccgtatttcctatatgcccgttctcaactaatgtcagcgctcgtatcctcgaaggtctttcgccagctggagtttatggctgttggaagctggtggatttacgcccctgaacagctagagtctgaaaatgacaaactcggtgcagaaaagattctctatcgcgtacctggcaaccgggaggatgtgtttgctgcaaatcatatcagcatgaagtctaagagaaccctcatgcgattattgcgtcatatcacgaaacccaatgaggatgacgcttcaaatgaagatgacgatatgtcaatgtccttgagcgattatcttgcttccaagttcagcgtcccggaggaacttcacaatcctctgctgtcgctgtccctgtcgcaactttctcagcatgatacttccgccagctatgctttgcccaggatccaaagacatttgtcatccattggccatcttggccccgggtttggagctgtgattcctaagtatggcggtggagctgaaatactgcaagctgcctgtcgtgcatccgctgtggggggcggtgtatatgccctggatacgcaggttaatgattgcttatggcgcacaggctctgaacattccgagtaccgttttctgttggaactggccaatgaagggtctgttcaggcgaaatacttgtttacctcgatgtcggatgcctgttctaaagagaggtcaacacccttggtcgaggttgcccgttcgatcagcgttgtgtcggctactttcccgtctcttttccctctaacagttgagggtgctcctgtgcccgcaactgcagttctcatgtttccaggggatacgttgggcagcccaaattcgcccccggtctatctccaggttcattcgagcgacactggcgagtgtccacagcagcagagtaagtcattccctatacagtccagcatgatatcccctcccgcccgctcgtatgatgatttttttcaaaaacttatctacattgcctgaacttgctatgttgaaaaccttttcacctgatcacgagcactctccaaatttgtttcttcagcaatattgtcgttcatatggctaattgcatgtcacaggtgttatctattgcagtgtggcactacctgggccggaaggccaagctcttatcgagtctgctgtggatagactaattcgggcggaaggtatctcggccaacgtgctgtggtccttgcgatatacccatagcggctgtatcagcaatggtgagccccggcatctcacggtcggggatggagttcctgacggctaccgtttccctccgtcgagccttgacttggcattcgaagatgacactctcgaccttgtaaaagaggcttggaagatagtcgtaggagatgaagttgatgatgccgattttatgatgtttgacgatcgcgatggcacttctgaccaatgatccgtagcatgctttttttatgatcatactattacccatatttccctacagaaatagttgatgaaatggtttctgttcgtttctagggaggatcgttatataaagtatctaatgctctaagaatcctctacaaagttatcgatttactgcccaacaatctcacacggtgttagatgttattatataaaatatgtatgctgtaactaactagttatggatcgcatgtgacgcataattaatatcggcgcaaagcagttggcagaacgccccatacgtcatgtcatgttaacctgattgtcgatatagatcttccgaatatctgttgttttcttgaacgtagattccaactaatctttgctggaataaaacttctatcctacactctcatcgatcgcaaacatatacctatcctcacaatgccactcgataatgtcaccggcggcgtgactggacagcttcctgccgaccaggcccaatcaacaacaagcggagtggtcaagaagagcgtaccaaaaaagctccaccgaacgacgaaggacttgaccgaccctgccctcccaggtcaatttccttccgacgatgctcccccaaaaggcgagggaatcgacaatgatctctcgttttcatcgatatggtccaccataacagcatggttctctacactattccctcgcgcctttgattatctcgagtcctacattcagggactggtcgcctggctcctccctccaccccgccaggctgcgttatatgaagctgcactgaagcgccctgccgcaacaaccttaatcgtttgccaaatgatttgctgtggagttcctctactggtgttcttggctggcgtgtttgtctttgctgcggtgtcgatattgctctgggctattctgtccttgctcattcttggtccggtgttgttggtcacaagcatgatgggcatgtctctgtggggctggggttggatcctctatgggttggtcaaatggattgatcggcgattcttgggtggcataattgcacgcttttggctttctcagacaaattcggagtcagacgatgtagaggatgagcccaaggaggagaaaaaggacgagtaatgtttgcgaatttctcggagtttagaggacatgtgattctgtattctgaattatttagggcataaaattgacattgacattgaacactgaagagcacgatatcttattcatatacacgctcagaatattcgaagagacacaaatggtaccccgatgaaaccctcaggcatcgtatatgtgatgttgtaaaatacaaattcgttgacagagtgatcggtgttgtaagtgatcgtatatttaggttgcgcgtttgtcaagaccttgatgttcaaaccaggtagaccttctagtccagtcacattgaacccgttgttgactgtgaggccactgaacaagaagttgaaagaaacaggaccgtgtgtagatgttgcatttggatatgagatattcaaagaccgaggggcggccacagcatgaatagatgattctgtaacccaatgggaaatgcagccaattttatgatcatcaatagcccactggatgactgcaggattgaattgactggggttgatactgggacccccgacaactgtctcggcaacagtttctgcaccaatagtcacgttcttggacatccaagcagtgatattgcgaggataagtatcaaagggcggcgagtaagcctgcgaggtatacatatgctcgccagggaatttgagcaaattttcctttgcctttgcaggtagcgatttcaccatttcaggcattgacagggcgaatagaggatagaacgccaaatcatcttgatgaaacatccccagctcctgctgagggacgggggcttgttcgcggccaataacaccccaaatgacagcaccaataagagatgcatactccttcatatcgtagccatatgagcgatcccaagggccagcaacattcttcagattcgcattataaagctgagcgagttcattccagctgtatttgagcatctccggtccatacttcttcaacaagctgtcacttgtcccatactggttccagagcgccagtgcccacatggcaacaccagcgtatgtcggagaattgaattcagacaatgtgtggtgcatactccagaggtcgtagatttcctgtgcgaatttctcaccagagctggttaagtttgcatctccgactcgtgcaccaacccagttttggagaatggttcgcatcaaccagggattggagtaacaagggtaagaattgtcgccatcaactcccccgacacgatagagatcacccttggctgcgatctgcagggacttttccaccttggagaccgtcgctgctggaaggagatggccgtaatcattcaaagccacaatccaggcacatcctacaaaatcgcggatgtttggatcccactgaccataattatattagcgaaatagtggattagactaggcataatcagcttaccgagctgtatgggccatcattgggatatttcagtgtcccaggctccggttccgaaggtgcttgttgataatcgccataccactgtttagacggatcgacatattgaccagagatgacattgtcgaagatgcggacggcttttgcaacatcgccgggtccgtttctggctagcaactgaggtgcataccaggctgtatgccgactatcatagcgtcccggactactggttgaggtgatcaaatagccggtctcgttgtcccagtatttgtcattccattcaatagcagcattgaacatttccaccgcgtgcgatgacgcaccaaacctggatgaccagctgtctagtggagcagcagagacgatcccggtgttatggacggcattgaatcctagaaggacgagtgatagcttcatgatgtgttggcaatatgaaaatggcaggcaaagagtgacttgcgaaagaagctcaatttctttcgctcaacttccccctgtgcctttgctgtatttatagcattttcaatttggctttcggcatatctcgtcaggtcgattgcattgacactgccgatgcctagcatattatgtttatctcagcgatatccaaacattcagaccccggtgatttcgccgtgatctccgaatatgccggttgctatccagagaatgattcaagtattctcgccatcttacactactctcacccttatctttagtgatcggcatccggtaattcctcagcattgccgatttatacccctccctgaatccttcagagcttccccgcaaaagcgaaaaataattccacctatgatcttatacaaagccgcagaaaagataagaccagctccatttgctacacatataatataagtataattacttgagccacttggaaccgaaagcgataatctgataccgagtcacaaacaatacagagagcgcgagaatcccaacgccaaaggcccactttgagtgagcgaaagtcgtatcattgccatcccgatcaaatggcggggtgacgggtgccatcattttgtgagccttctgaaccgagtaggggggataccgcgcagcgagaagcccctccaaccatgaaggcacggcgttgatatgcgtacggagatgagagaaagtcaagataccgtgcgggccatgatagcgaccatggccggagttcccaacaccaccgaatggcacatcgcgagcagctatatggagaccgcagtcgttgaaggtcacgcctccggactgggtttcgttcaagatgcgagccttttcggattcttgagtagtgaatgcgtagatcgcgagtggatgctctcctgaacgcgtccgagagagagcagtatcgaagtctgcatcaatgatggggagaatcgggccgaaaagctcttcggagagaagggaatcgccgggtttaacgccggtgatgattgttggtgcgaagtacagactttgacgatcccgctggccaccatagacgatttttccggaggtctgttgaagtagattgtcaaggcggtcgaagttacgctggttgatgatgtgggtgtaatgctctgcattgtcggctttgcctcctaggaacgtgtcaaagtatcgaatcaaatcagcgacaaggcgttctcgtacacttgggtggactagaacgtggtttacattcaagcaaacctgtgttcagtcgagacgagttagttgatgactggaacgtgaatggtgtgagcctacctgtccagcattcatgaatttagtaacggcaatgtgttttgcggcgagatcgagattcgccgattctgcgacaatagcaggacattgaccacccaattcaagtgtgacgggagtcagatgctttgctgctgctgcatggatgattttggcaatattgggagatccagtgtagaaaatgtgatcaaagcgatgctcaaggatatatcccatttcttgtgggccagcggaaatacaccggatcgcatcttggtccatgtattggggaataatttccatcaggacatcttgagtggcacatactacgtccgatggtttgagaatgacggcacacccagcagcaatcgcagcagccattggctgcaggagcagactgacggggaaattccatgcgccgataatcagagtcacaccaagaggttccttgcggacagtggctcttcctacgaagttgagaggatcggatttttccggtctttcatccttcgtccactcatccagttttttgagggtgcgtagaatatccgcttggatattagcgcagtcgccgatgtaggcttcttgatagtgtttgtgtagatcgatatagagagcgttgcagatgcgcgtcttgttgtcctcaatcatccaccaagcccgtttcagttgacgacgtctccattccttgctcttggtggtgccagatgcaaaagtaccctgtacaatttgatacgcctagaaaatgtgaggggtgatatcaaatagtatatggatgagatttacctgatcgaactcggccgtagtgctgaaacccatggtgagctgtagagatgtggagaggtgggaggaagacgaggttatggggaatactcacacagccgtgttgaacatgacctcctgaggaccctggtctaagactgcagttcattttataaatatatcatgcatgattccgtttggttaatttagattgaccttgagatttttatggtcgcgaaatgagtctcggggtgagatttgtacgctccccgaggccgaagtgcattattattgcattaggaaatagaatcgccatttccctttcctggatgtcgaagatatctactccgtagagtatgccgatctgaaaactaggaactggatattctcgttgaaacgtcgggtttggccatgctaatatgcacagttggggttctatctactatgtagtctataactatccagtttagatatacaccgaagcctgcaatagctgtttttatagcatttgccgtctgttcaatcatcttagcatcaataagctacctctagcctagtaggagactctagattccttatccaaagccccttttgccaccaccaaaccctttagataaacaccaaagtgggtattccaatatcgcagcgaatagaaaccaacaaagataggaatgccaataaatacagagacacttatctccttggctcacatataacaggggagctgctcctccactcatgcggggtagacgttgaacaatgactgcaatttcgagagctcgtacaggttgctggacatgtcgtgcacgacgtatcaaatgtgacggtaatttcccatcaagtcctgcatcaacacagtcctaactgaaatcttggttagaaacccatccaatttgccgtcgttgcgcccgtaacaatgccccatgcggatacggacttcgtctggtctggcacgaggaatctttagcccgaggcatctgtcatggaagagcaggggtatggtccaagcgaaaagatattcgaaagagggaactggaacaagtagaagatacatcatcgccatggacggagcatacggccgaccggacttggatgtttctgaacacgacaatgaccgatctccagatccatttcgatggtacccagcccaattacaaaggcatgaagccaatttctcaaccaagcccgttgtcgccttggctgaataccatagctcctggccagcgatcagattgcgatccggtgcttatgtcttatttcgaacacatcatctgcagcagctcaactctcgtcgatagcgcaagttacaatccatatcgatatctcatactccctatggccctacagtctgagggactataccacgctgctctagccatctcagccaataccctcaagttgtcggatcagcgataccggcttccggcattggaacatcatcaccgggcactaaatcacctgcgcggtctactgaatcaagacagctggacggaaaatgagctggatgaaatgcttgggctggtcttgatgttatgctggttcgatgtaagattatgccttgcttcctttactatgagaatctcctaattccgttgcagatatcagacagcagtcgcccttcatgggtcacccacctcaacggattccaaaatttaatgcggacacgaaaagaacgccccggtcgctcatgtcacagtcaagaattggcaagtttcttcaatcgttatttcgtcttccatttagttctagcccgcactgcgtttcggctcacccctgccccatcccatatatcgcctctcttgccggacagtatactggaaaaatcagacatcatcgatccgtacatgggattgagccccgctctcttattgatgatcgatcaagtagccgaactagcgtggtctcgtgaggatggcaacataaaaatcaaccgtaaagatgttcatcaactcaagacggacctcgatagtcttcaacaaaggatacccacagagcatatcgatccgaacatggagtgtgcggcaatcgcagaggcaaacaggctcggcgcccttcttcttttgcacgaaatctgttcgaccaaagctccgattaatcgctccggtatcccgacattggaatccgaagagaagaatgtttatgttgaacggatattgaccctgatgttggaaaagaagggaaatatgatgcgaactgcagctacgcctttatggcctctcttcttggcggggtgctgtgcctgcagggaagaggagagggtcattgtgttgcagttgtttaaagagctggagggtattcgtcgattcggggtatgtataatcttctgtctctttctagttgattgactaacattattattccccagaacattacccctgcgattgaagttgtcgaaatggtctggcgccagcgggatctgtcggtgcaagatgaaagaaaactccagaagaagcttaatgcacagcggcagaatgatcccctgcatgagagccggttttcgtgggagcatgctatggtcatgctgggtgggtggaagctcagcttgacatgagcttttatgtgggtaatgaagggttttattatgttcttgtatatattatttgagggatggtctcaatttgtatagcccgcagtcaaactgtgtttaattgttcgacttcttgcacctttcatttagacaaatcatagtttagaagcatggcttctttcatgtgtatgtctacccttccaccctgtaaggtcgctcaactccatttccggatccaagtgcgctaggttcttcgcagtactcttttgtccagccctccatttccattgacgcacaatatcggggtcaagagttccctcgagcaaatccgcgacatatttcccaacgacaggaaggaacttgaacccatgtgctgagccaccggttgccaggaagagactttgatgaatgggatgaggcgtgacaaggaaatgccgatcagctgtatcagcatcccagcaaagccgtgtatagcagaagggtctgtctgcaagctcgggaaacacgcgccgtaaattccggcgcatctgagcttcgatctcgagagggaggccatcggtgggtgcctgcacgaaggtgtgtgggacagaagtggtgataccagacttggtggtttgcacgttggtgatgaattgactgtgagccatcttgaatatcccatcttcaagaggtgggaagaagtagcccagctcgaggttatccataatgggcattgaggcatagtgtttcgtttcagaaggggtgagctggatatgagcgacactgtgtcccttggcagtcaactggtccttcacgtctagcagtgaaggtgtccacgcgcctgcggctaggatgaccacatccgcctcatgtctcgtgccatccgcagtgacgactcccttgcactcgcccgtgatatcatctagtatcaactcctgcaccctcccctttgtgtcccccgaaatatattccacccctttctcctgagcagcgcctgccatccgctcgatggctgtaccagaagctgcccacccggctgttgggttccacacattgatattccacccgtccagcttgcccgtgacaacagaccagcgagcacggatctggtccggcgtgagcttctcaagaccctgtactccaagcttcttgcatgtctcaatcgaaccctcgacaaagggccgggacaggttcgctgcgctcaggatccacccggggacatgatagagcccacgaaacagcggccaagaccgccacgcttcgatagattcaattccaagacgtgcgtatagcggttcgttgtaatcgctgcggatgatcttactgatatcggtggaggctgcttcgcaggaggggggtgcgtatgggtcgagcacgcggatggaggtgtagccgcgctgtgaaaggtggtatgcggtcgaaatgccgaagcagccggcaccgacaatgaggattcgcgtgtctttttccatcatgtgagctggattgttgtggtgactaggtttgacttctcaaactttgagggtggcgtcgccatatttattgaggcatttccgccttctttcggagaatctgatttcgctaccagcttcctcatgaacaatcaaaggtatcatggagatggtctcgtgtgcggggaaataatcgactgcttcgttccgaccttccgataaaggtctcactgcccggagatactcggagaatctccgagtggatgctcgtttcgacctgcattcttttacctttaccccagcatttcccccaactcaaagattgcccaggtgcttaatcttatttgtttccgtggctctgggatggaaggaagtatgccaaagataacaacgttctctcgggcgacaatgaaatgaatggctgatatcgcagaaaattggctaatcgtacaaagtgtccactaataactagatcattcgtgacaaacttcttacttggatatgctgagagcttatagatacacaggtatcatacttattaacctatagacgttttaacggtctacgggtctaggtctagaatatcgagtttcttctgaatcataggttgtcctctagaagagatagacaatcttggcttatttcagagtgatatgataaaatattgactaattcctggttcaaagggtacatgtatatcagaattgccattcattccattgcgtacatttgccactctatccatacagtatccttatcaacagtaacccacatctccacacacatcccaaggctcactatcctaataagtataccggaaagagcgtttttctttatcagtcagatccgagaatgcagcttcggatatctccacatttgactcggcttccttgtcacggcggtagttttcccatcggcaaagagccccataggaaataatggcaactatagccacaacaagacaggccagaagaccctcatatcctcgagagtaggatggtgcatcatcggaacggaaacactggggaccaatgatattgccaatacaatacgccaagaagaagatggcgttcatggtcaactttttgctatggccactggtattggccattggaagtgaagttgacaacacgtacggcgcccagtaggtgtagaagacatagtatgccgccagaagcccatgctggttctcacgcggcagcttccacatcagaatagcgcagatcatggggaccaagttggccagggcgataatggtacaacgggagttgggcacgctagcagctaggaagcccagcatgatctgccaaaccgttgcaagcacaccggtggggataccaaggacggtggtgatcaatgaggaataccctagacccttcacaatgatagccgagaaagtcaccagaccaccattggggatgttctgggccagcgaaaacagcgccagaagccaagtcttggggtcgagtaaacactcgcgcacttggtaccacttgatggttttgtcttccatgccggtattgttgtctttgacgcgctcgaggcagacgaacttctcgcggtccgagaagtaccagcattgcacgggcgaatcgggcaagaatatgtacaaaacgacggaccaaaggacggagaatccacctagcacaaggaagagcaatctccagggtcctaccgacgtgttcgtttggccgataccatagctgatcaagcccgagaagacggaggagagctgattgaaccagaatgcgacacgaagaggctgctcgcttgtcttccaccacatgacagtcaaaatgctggagattgggaacacggcggcttccgtcatgcccattaagaagcgcacggcggctaggcccccaaagttctgcgttgccgcagtacacaacagcagaattgcccagcccaggaccatgcccacatacaatttagccacaggaagccgctgaatgagtaacgctgtagggtactcaaaggcaaggtatccaaagtagaagattgagcctacccaagagtactgatcgccggtcaagtgggtatctgtcttcatgccgtagatggccgcatttgagatgatgactttatcaatagcggcgagaaccactgtcaccatgatcaagggaatgaggatcagatcgattttccaaagcacacggcgcgcttcggcctcggtgacaggttccaccgcaatggcagggtccaggtgagcgaggaagtgtgccgcaacatctttgccgttggttttctcttgggcttcaaggatttctccttcttgggccttttcgtgatcaagggcgagttgaatctcgggagggttggtatgtttttcgtctgccatagtaaaaagggtgtatctgtatcaggaggtagaaagggatgcgtacacatcgaaaacgaaggagatagtcatttgggatggttttatactttggaacatcagagtgaaagataggtccaaggttacccagacggttatcatggaaagtgaagtgaacgaaagtttgggtgcgccaggaaggtcggaccgactgataagcgcatctccacgttcctctccccgctctatctcggtgttcaccagccggtggattagattgtggcgttctttttttcgtcaagttacttcgcttcgacctgctgattagttctaatggagctaatggagcttcataaaaggaagctttggtccttgcgttctcagggtatctgaacatatcccatatcatgtctacccaattaggtgccccaagcatcaagatcgccatcggtgagtcacttgcaactttataattcatatgatatagcaaggtgttaatatcccttctagatcgtggtggtactttcaccgactgtctaggtattgttgatggtcgcgatgaggaaatcgtcgtcaaactgctttcgcaggatccagccaactatgccgatgctccgattgagggcatccggcgtattctggagcaagcaacaggcaaaacctttccccgcgatcaaaaactcacaactgccgacttctcggatgttagcatccgcatgggaacaacagtcgctaccaatgctttgctcgagcgcaagggagaacgtcatgcactcttgatcacaaagggcttcaaagatgctttgcgtattggaacccagtctcgaccaaagctgtttgcactcaacatccaacgtcctgatgttttgtatgaggatgtggtcgagattgatgagcgtgtcacaattgaggattatcaacagaatcccaccccggacaaagagagtctgcaaaagtctttgcaatcagatgcctgtttgaaaaaaggtgttagtggagaagtggttcgcgtcttggagcctcttgacgaggaacgtacaaagcagagccttcagcagctgtatgaaaagggctatcgctctatcgcggtctgtttggttcactcatacacattccaagaccatgaacttgcaattgagaagattgccaaggaaatcggattcactcagatctccctttctagccaactcttgcccatgattaagatgacatctcgtggtgcttcggctacggcagatgcgtacttgacgccagtcattcagcgttatattcaaggcttccgctcgggtttcaaggacggactgagctctgccaatacacgctgcgaattcatgcagagtgatggcggtttggctaattttgaaaagtatgttgacattcaattactaggaatgtagaaaagaaattttactaatctcttatagattcactggtcttcgtgcgatcttgtctggcccagcaggcggtgttgtgggatacgcgggaacttcattcgatgagacagatagaaagcctgtcattgggtgagtctaaatttaccttattctatgaggggatcatcaactaactttccagattcgatatgggcggtactagcacagacgtctccagatatgacggaaagctggaacacaccttcgagaacaatatctccggtgtcacagtgatggcaccccaattagacatcaatacggtagctgccggcggtggtagtattctcttctggcgacatggattgtttgcagttggtcccgagtctgcaagtgcccacccagggccagcatgttaccgcaaaggaggccctttgactgtgactgatgccaatcttttccttggccgccttcttccagcatacttccctaagatcttcggcccgaacgagaacgaagccctcgatgtcgaaatcacgcggaagaagttcacggagctcgcagagcagatcaatgctgaaaccggacaaaacaagtccccggaagagatcgcgttgggcttcattcaagtagccaacgagtctatggcaaagcctatccgagcccttacagaggcacgtgggtacgatacttccgcgcataacctggcctgcttcggtggtgccggaggacagcatgcttgcgccattgcctcttcgttgtctattggaactgtcatcatccatcgattctcgtctattctctctgcctacggcatggctcttgcggatgttgttcacgaggctcaagagccagcatcaggagtgctggatcagacagccatggaaagcatcactaagcgtatcgctgcgttgaagtcaaaggtcactactgcgttaaccacggacggcattgatgaaactcagattcagcatgagatttacctcaatctgcgataccagggtaccgacaacttgctgatggtgctcgaacctgaacacggagactttattgctgagtttgtcaaagagcacgagcgcgaattttctttcacattccccggtcgtaacattctcgtcgaagatatccgagtccgaggcgttggaaaggcaacctctattgcgccagaggcacctcaacaagaactcaaatcagtcagcaaaaagcccgtgggcccagagaagcaggatgattcatcttctgtctactttgccggcgtcggtgaagtcgctacgccggtcttcttcctggataacatgcaaccgggatatgtccttgagggtcctgcgatgatcattgataaaactcaaactattgttgttgagccaaatgccactgctacaattctgtcccggcatgtgatcttggatgttcaatcttcgaagaagcagactgcggatgcaacagtcgtggatcctatcagattgtctatctttggtcatcgcttcatgtccgtcgctgatcagatgagtcgcatgttccaaaaaacctccgtgtcaacaaatatcaaagaacgactggacttctcctgtgccgtgttctctcccgatggaaaattggttgcaaacgcgccgaatgtgccagtacatctaggaagtaagtcatccccatttagaaaaattctcttttgaccaagagaacttcatgctaatttcttcttcaggtatggagtatgctgtccggtatcagcatgagaaattcggaggcaatttgaagcctggcgatcacattctcaccaaccatcctcttgccggtggaacacatcttcccgacattactattatcactccagtctgggatggtgagggcaaaaacattgtcttctatgttgcctcccgtggtcaccatggtaagcatgaattattctcatttcccttcactatttcactatttgtcgtgtcatgctaatcaaaagcagctgaaattggcggcatcgccccgggatctatgccttcaaacagcaaaatgctgtacgaggaaggtgccatgacaatgggcttcaaggtggtatcagaaggccgctttgatgaggagatagtccggaagttcctatatgatgagcccgcttcgtatcccgattgcagtggcacccggacatacaacgacaacgtttcagatttgaaggctgctattgcagcaaaccacaagggtgcacagctcctggaagctctggtgatcgagaacacattggaagtagtccacttctacatggacgcgatcaagcgcaacgcggaggttgctgtccgtgaactgctcaagtccattggtcgtaagaacaacggcgttcctctccgattctctgacttcatggacgacggcaccgagatcaagctggaaattcgcattgattccgagactgggtctgccgacttcgactttacaggcacgggccgggaaacattcaactgcctcaatgcccctaaagccatcgcccactcagctatcatctatagtctgcgggcgctgatcgatgttgatattcccctcaaccagggctgtcttgccccggtcaatgtgataattccctctggtacacttctcaatccatctgggcatgccgccgtctgcgccggtaatcctattacctcgcagcgtattacagatgtcgttcttggtgcattcaatgcctgtgctgcttcacaaggctgctgcaacatcatctcatttggtatgggtggcgtcgatcccaagaccggcattgaggtacctggatttggcgttggcgagacaatctgcggcggctcaggtgctggaccatcctggaatggcacgtcgggcgtgcatgtccacatgacaaacacacgcatcacagatgcagaggtctacgagctacggtacccggtcatcctccgcaggttttgtatccgagatggctctggcggtgttggtcgcttccgtggtggagatggtgttatccgtgagctggagttccgcatgcctctttcggtgtctatgctaagtgaacggcgcgtttaccgtccgtatgggttggcgggaggtgagtccggacaagcaggcttgaatctttacctcaagaaggagctcgacggaacggagagaatgatcaatattggtggcaagatggagcttatggtccaacctggggagcggattctgattcatacgtgagtggtctacatctttcctccttcatctgaatatatatgctgacaattcttttgatttagacctggaggtggtggctggggtaaggcatccaacgatgaactagtagcgagtgacagcaagagtcatcagaactcttcggctttccagccccgaggaagtgtgcatgcattcagtgtcgctgccgaggcggcaatgtgacattgggatatagatgaggatttttgaatcatgtagccagagatttgcatttttgatttaacattatgcagtgatgtctttcatgaattattgatagtttccttgtgcagatataaaaacttattagcagaccatgactaccgctcgactttagaagatcccaatgattcttttcactgttactgtaagtcttctcatttagcaagggtctgattcttcgtccgtggttcaatctatcgcattggcatctttgatctgacataagagatgcaaatggtcgtactgcttctaaaatgctcaataagaccgaagtcgccaaagtgctggagaatgcacataaataggaaaataacaagtccatcagtactataaggttgaagttacgaagagtcgtttcggttaagggatgctatgagttcgaactaatggaggtaaaggtcacaggagcaatatgactgtcttcaactaaaagtgtgcaagtcaaagaatgtgcctgtagctatatggcccccacgtgaccgtagcccggcgaaccagtgtttaccaaaagttttggctccctcgatgcccgacaaatttattctttcgcgcattcatctcgcagaacctccctttattcaactcttacttccgcacacatattgactccacatttactcaacctcttgactgcatcccatctaccgtcatggagtaccactccgtcccaccggaggaacgtgctagagacgaagatggcaacctcctcccttggggttatgtttacaaagagtatgttcaatgtatcgtgtagctcctcttttaccgaagctaacaaatatgtctcagtgaatctcgcaaccctcgacgaccacccgaagaatcaggaccattcggcaagagaagaaatgctcgatacgataatgctcgctcacgaacacggactggaacaccagcaaagcgcgagaaccccaatgttgctgagtttggtcgactattctcacagcaacaacaggaggccgagaaaacacacggcttgcccaagtcatcatcatcatccagtcttgacaatccacggaagcaaacagagaaggtcgcaaccgaatgcatactctatgggtacaaaaacaaggacaacgagtggaaggtgatcgaaaaatttgagcgcatctcccaaggcacgatctgcgaagactaccctcgcaacgacccgaattcatcgatcaactacacccatctattgagcgggggtgacgtcgtcatccgaaacctgtcggctgatgcaaatcgcaagtcgaagcgctatgccggtggataccactggatcaaggtcacatacgactcgacccagtccgcagaccgcgcgcgcttctactcgccacaggaaattgatggccacctggtcttttgcgagctgtacaatggccacggcccagccgaagacgccccaatccctgcagattctgttgccagcagtcggattcgcaacaaagcaccgcgcaccttgaccacctcgcactcgaccgcctttctctccaaccccagcaaagatcaggaccgcatgacattgcctcgatcctttgccatgaacaacctttccagtgtaccggatatgccagaagacgaaaggcactcggtcgattcttcaacggtcgctggtacctccgacgatacaatgacatccactactgcaacctctgcaactgccactgccacaccctcgttccagcaaagcagtttcaatacaacaacttcttcgtcaacatggacgacaggagcttcgtcaagtaacgatcgcgcctcgatccaccaacgccgagctcccgatcaggccgaacccaccgccaacaacgaattcatgacgcatattccgactgtccgtcgcaccaagctgcgccctatgctcgaggcactccctccacagccgaccatgactgagcgcatcctccgctcaatccccatcctgagctggtttacaggtgacattgtgggcgagggtccggtgctccgcgaggatggcacgttcgattcggaaaaatctggcatttattggaggttctggcatacgttcgattatttcatgagaacggatatgtgcggactgaaggaggatagttgaggcgacatgaaggccattgagcactatggaaatggaataccttttcgtcttttgttattcactacatcacggatctttcgccccaattgcgaagtcttgcgcgcgatgaacctaaaaaccgaatcgctacgcagcttgaagggccagtcctcaacaatactgcgcgcgtcgcgcaaggcatgggggtcaatggatttgcggtaaaatggataatgtgtacgatagctgcgtcagatgcagacataatgaactgtcctgtcgagggaccgcgcaaaattgatatcccgtagaacagtaacaagtacaattcctcaaacttctgcttcaacaacttttcgggtggttaatcctcgagctgtcagaagtaacatccccctttccgtcgccgagtgcatcaacaacgctggcacgttataaacccatgcatcaaccctgcccggaggaagagaccaaacagccagaagaaaaaaagagaaaaagaatcaacaaaaaacaactctcaaaccagagcttaaatttcattgatcatagacgaaagtttttaaagactcgatttagttcgcatctaggcgtgtttattccttagtctcgaagttctcgccctcgacaaggtcggggatgtcatcctcctcatcgtcctccttcttatcaccctgctgcttctgcatgttctggtagctctcggcgagcttacgcagggaagcgagggagtcggggccgagctggttcaggatgttggggacgagctcagtgagctccttctcctcgccgttgccgtacagggcgaaggtgttggaagggacggcaccgtggactattgcgatgaagtgattagactttttttgttcttcttctttccttcttctctttgttttgaaaaggtcaaggtcgggtttcggggtggtttctactcaccacgggggttggcgaagtggatgacgttgccgtcctccttgaacatgttgacctcctcgataccctggatgggctggacgttcagcttcttgagggcggcctggagcttcttgtcatcggcgccggagttgcggacgaccttcttgaccttgcggcggggagtacccttgccactgtaagattgttagtccgagttcgacattggacggttgaaaaatgtggtatcggtgtgggtaagtgggtgaatgtgtggtggggggatgtgaattaggaggggtccgaaaagatcgaaggaatgcgaggatgacagggccgagagtcagactggattttctgaggcatgcgatatgcgatatctatgttcggttcgaaatttggatatagtgcgtcgcatagattcgagaatcaagaatccgtagtctgactatcggcagtgtcgaatccgagtattgcaattcgaaaattcgtttcattcgtagggaatcgagaggttgggataaaaacaatgctggatagaatatacataccctgtcaagaagaatcatgttagctatcaaatttgcacagttcaatgtccaccaagacatgtaaattgcagttcttgagacatgaccaagctccagggcgaccgattccacagaatcgcaactccacgtcattgcccagttcatatctcaagctgagatatgatttagaatagagagaaacataccgatgcgaacgctcgcctgcattctagccaactttgcctgatccatgatgaagtcgggaggggtgatcgcctggcgcggaattagctggtgattcggggaaaatccaagatttagagagaattgcagagtcaattattctgacaatcaatctctattgcataccgttaaaaaggagttgagggggagatggtaggaggaaacgtgaagtggaagtgggtggaatgatgatgcatccccaagagttttgtgtggggagttagccagaatattcgctaatgcgccgatttgggttaacgggctgtttgtgtttcaacgtctacacttctacatgttttacaaatcgactcgatcgcgataacactctatttgttgttcttcctggtgattttggctattcgcaagttccagggttgttggattgtgggatatttggtgctcggctaaaccctaatcgggctgtcttcggagtatatgacgaacatgggacttatcctgacgctttgcacccattttcattccactatacgctgttggtcatgttctcgtggatccccggcttgcatctcgcttggatgatcttgtatgtgccctacgtgttcgagcaaggtctcattgtctgggacgagcatgttgcgcgcgtaacctgcgaggtggactccagcgtctgggtgtggcaggaggtcttccggggagggcttgcggagcgtccattggccgggcacttatctaggggctaggacagcatgaccggcatcgaaatccatgcttccggctacgtaaaggcgggagaatggcagcgcgccttgcagaacaatgtgaattgtaaaaagcagagcaaagctaagtcgcagataatatttcagtcatattatacatccatatatacacccatatatatatacctcgatggttccattcattgcttcgaaacctgagtctcggtccaatcccagagcttgtgagccaattgcgcgttctgcgcaggcgcagtgccaccactgcgatacccaacgggagtatagtaagctccattgatgagatcctcccttggcgtgccagccgcccaaagagaattcagggctccactagcgacacttcggaagaacgtggaaccaacagctgtcagagtatacttcatcgtcgagttaaggttcttcgcatatctatagagcccgctgtcaaccgctccgggatgcacagcaatagacaagatatcaggatgccggcgggctagctcggatgcaaagaggatattagctaatttggaagcgccgtaacgcgtccaggtactggcagctaataagccaggggtagatgtaatttcctcaaaggtggaagggctaacagcgagagccgccgaagcgacagtcacgacccggacatcggggacctcacccttggcacgctggagatcagcggtcttctgcagagtaggcagaagcagttttgtgagcagaaagtgaccgatatggtttgtgccgagctggacctcgaagccctcctccgtcgtagtaggcgggttgcccatcgtgcccgcatttaggattaggatatccaggcgatcgttatcggtctggaacttgtctgcggcggtgtggatagatttgaaggaggacagatcgagtgcgaggaagcggatatcggcgggggaggagagctggctttgtagcgattcgattgcttcgcgcgctttgctctcggtgcgggcggccatgtagatgcgtgacgggcgatgcttggcgagttgaaggatggtctctttgcctaggccggtattgcctagatcaatcaatcgcggtgtcagtcttctagaagctgtagatagatagaaagaagacatatattgtacctcctgttacaagcacgaccttgccgtccaggctgcgaatgtcgcgctctggctggaacgatgccccgaaatagccgaaagtggcttcattcaaggtcgggccaaagctcgacagtgcctccagaggatgacgcaagctgtaggtcgcaaagccacgagtggctataatatcacggagatccatagttccagatccaattggagaatgtgaggggttgtagaagttggaagcaggttagctcaggggggatttaaagtaggaaaagtcaatcatgactaggggccaaggaataacgccgtccattcttcgcatgtgaagtttttcagatcttgatcttatcaagatttccttcctggcccgtaaagaaacaatacggagtggacttgcatttatccctttgtggatctttgtgcatctcacatcagaccatgtcgaattcatccgccaagctagttagttaaaccccgctgcaggttgatcccccttgtatctctcgagactctctcccggccacttgtcctgtagactttctactccttgttttcttttccttgacgtaacacaaaaattccgaagtgtctgactatagtcttttataaagcaatctacgtgacatcaagcgaaatccaaccacaatgcgatttctttgcttgcacggtgccggcacaaatggcgaagtaagcatttcagtagctttaacatagaagatactgaccagctacagatctttgaaatccaaacaggaggcatccgccaattactacagaaaagtggtcaccgcttccaattcatgaacggaaagataaacgcgaaagtccaagagggtgagctctattttctacacacgcctaagccatttactaaccccaactccaacccagaactcgaaggcatagtggatggccccttctataaccactacaccagaggtacctcaccaggctccaccgtccttgaagccttcgaccacaccaagcaattcatcgcagaagaaggcccattcgatgcggtgataggcttttcacaaggcgcggcactagcagctgcacttttaatccaccagagcaagacgtacccagatgagccgccgctattccgtgcagcggtgtttatttgcagtgcgatgccatgggagagttccggactggagcagatttcgccgcagccagatatctatccgattaccattccgacggcgaatatcgttggtaaagccgatgcgctgttccccgagggagtcaagttatttgagctttgtgagcccactaaggcggctttctatgatcatggttctaagcatatggttccgtttgatatgaagaatacggaggagatggttagagttatcgaggagactgtcgcgaaggctatcaggggttagctgagatgatgggaacttgtggatataggcaactattgactttctacaattccacctatgtttccaacctcgtaaagtttatagattgttattcttctctgccttgtctaaactactacagaatttagacaatttcaagaactaatcatgccaagcgcctaaagcaccttccctgtaagattggtgataattcgactttgatcaatggtaatgtgcgaagtggataaataccgggaaatgatatccaaaagtgactcttcaaatgagacgctaggttatgtactatcttgtgcatatcgcatatactccgtaatattataaggtatgatcttggagtgagcaaagttggaaatgattatttccgacctgtggttagttatgcgatgctgcatgtgtcatgactctggccctgagattggttgtctctcggtggaccatcgttggccgaacagcgccttaagtagggcttttggtaagtttgtgcaggttgaaagtggacctcccagcaaagcccgggaactagtaagaatgggtttactaaaattgcataactaactagttatttaactagctatctaaaaagtctgtctcggcggagtcagcggctaataagaaaaacagttctcactaaccaagggcgaagtgggtgctattacttcatttgatagccttgcagtggatgatgccctactggccttcgaggacactctttcgattataggaaaaaggtggggttgatgcatgagcctgaccttccaagagatatgctagtcaagctggccgacgctatcctccatagcgagttggctacgcgaaaatcgcttcaagctgtggttgttggattgggctgttctgatgaccatgtctgtctgtatcagcagctcacactgatctttggcttcctttttagtctttcacaatttgtttctcgggcaccaaggtcatcattattgataggcacgttttttaaagccttcgagggattgataaatcattattatcttttgcgttcgtgagaaagaagcacatcgtttcatgttcgatagatgcattgcattgactgatcgagacaaaggcctcagatggggtatatgaaatatagtgcaagagattatacaagtttccacagcatactaataataatggtagcatccatgggtgagattgtcatcagttctcattgtgggctttagtacggagtacatcgaaataaatatccgatcaatccgccttgtatacttcgtacttttccatatcggagattgcaatagatttgttttctgtttgtcgcaacttgaggcttgtttcatagattaatcatttacttccttgaaaggtaccccgtacatgtagcgccaagtcaacgagacctcggcggaaaatgttgccaaatgccagaaatgccagttgctactaataatagcacgtgggcgggttcctcgagcaacacacttctcacacttgtatgaacaggcagccgtataatccgtataataagaaaaaagctttggagacaaactatttctgcaccgaggaatatctacggaatacaaagtcatgtgttttacacatgtacttgtatgaagtataaaatacatcgactatcatgcttatagtaaactccattgtgcctgtttgtgatagataattttcttttgatcatcccaccacgatctaggctgattcaacgccactggcttcgcagccaataaatgccaatggtcctagacttgaaaatatttaacattcaatcccaaagaccaaaaccgggagcctgctttgtactgagaacgccacaacacgtgactctgggcaaagccgcctcagcggcaactcacaacttgtcagcttcactccagacaacaccgttaatctcttcccctctgtcacctgccgtcgcgctgtatcccaatctttatcagcatacaatagctattccccatacacaccgtctgcgttgattttagtcccccagactccccctttactgcgcctccccatcaaaacagcgcaacccctagtgctcctgcgagttcgtctagacactcccaatatccggcaatcaaaaatctgagcttctctcaaattcattcacgactctcataatggctgcctccgaacaaccttacgacccctatatcccatctggctccgctggagcccccgctgccaccgggcagaatggcaaccagcgaaccgccgctttgcaagcagtaagtcaatcctcgacaatctcttgactcctagcgacctcagccagtgagcaaacagacaaatatggtctggtggatagcgaatgcttgctttcttgttgagctatcaaaatgcgaaggctggggcggttgattttcgcaatggggctgacatggtatcatctatagcaaatcgatgatactgtcggtgtgatgcgcgaaaacatcaacaaagtttcccaacgtggtgagaacttggattctctccaggacaagaccgacaacctcgccgtctcggcccagggcttccgccgaggtgccaatcgcgttcgcaaagacatgtggtggaaggacatgaagatgcgcgtgtgcctagtcatctgtgtgatcgttctcctgattgtcattattgtgccgtccggtaagcgctccttggcattcccctacctgactctccagcgcgacactaacaccgtccacagtggttgccactaagcactaagcacttcaactgcgcgcgacttacgacttatctttggacatgggatcttgaattttactgggcttactgttgctgggcccgtgtggccttttgttttcttcacagccgctaatacctcctgctgtttttttctgggcgtgttttcgatgaccaaatcctctttgacttttccatgcaacgaagcgagatcatccgattttgggttgtgtcacctgcgacccggtcgacgggtgaagatgtaaatgatacttccatgacgccgtgttcaagtatgcttaccacacaaccattcgggtgctttctgactgcaatgaatctcccttatcgtgttttgaagcgaatttcgattgccgagtcttgctgtacctgaatagcatcatagctatacaatgtagaacgtcaatgtagatccacactgagcaaagacaacgtccagccttgtgcatacataccggttcatgagtgtgcacaagtgatgaaggaagaagggcgaccgagtccggcagagattggggtctctccgcttttggctagtatttacattccctgtttcgtagacaaggcggttgaccattacagggctgagggctagcagacttggaagtccacgtggcccaagacccgtctgacccgtgaagttccaattcgccaatgagaatatccttccaggaacccgttatgtatgctttacagagtatgtacatacatatgctcgagctctacttggcattaatctaacatgatctaaatgtttccaccgtggatctcctgctatacgagtgcagcagcgcaatcctggcccctcctgacgaatccttcgggaattcatcaaccgacagtaagaaaaaatcagataataatggagactcttggcacgagaacgagtgtccaccgattcctcagttagaccacttagagaagccctcgtatatatgtcggcaggaagcgcagagtgctaggtccagccagagtggagggaagtggatagcggtgacctaacggaacgagtgagaggcagggacaggatcagataactgagactaaacccaaggaggatgacgtttcacgatctccgagcagaggaagtgggctttttcggaggtcatactctctcttgaggaagtctaaggagattccaagttccagggttgatatccgagcccgtgaagaaactttttcttttatggagtttatttcgcccggttgcggcgtcacacaaatgttaatattgtacagagaaataaaagaagaccagggaaaataatcctctaggagttcttgagacaaaagaaataaaaatcaacaattcccatgtatacgaaacgtaaaagaatcccaattgcaaacaaagatggggagataaattgctcgctagagagggggtccaccgccttctccccgtcattgggtcaaagttatcgctccgaggcccggccgatgatctgaaaaatatctctcttgactcaactttctcacttaccaccttccttctacctacttatacatatttggggcctctcccacccagggccgaccgtgagaccattgaggctgccgcatgtgcgttgccaagatgatgtcccttcgctccgctgtgcggagagcttcgtgcaagcccctccgttctctctccgcaccgactgctcctctgcgagtctcagtaaagactgccacatccctgcgccagactcgcaattactctcgctcgacggatcctcacctgacctctacccgcagcaccgtcgtgcaactgttgagcaacattggctctaagcgcgaggtccagcagtacctgtcacacttcacctccgtgtcctctcagcagttcgccgtgatcaaggttggcggcgctattattactgagcacctccagaccctgtcatccgcgcttgcgttccttaaccatgtcggtctgtacccgatcgtcgtccacggtgccggcccccagcttaaccgcatgctggaggcggccggcgtggagcctcatttcgaggatggaatccgagtgactgacggcaagaccctggccctcgcccgcaagctcttcctggaggagaacatgaagctggttgaggagctcgagcgcatcggtatccgtgcccgtcccattaccgcgggcgttttttcggccgattacctcgacaagcctaagtacaatttggtcggtaagatcaacggtgttgacaaggcgcccattgagtcagccattgccgctggatgtctgcccatcctgacctccatggccgagacccccgacggtcaggtgctcaatgtcaatgctgatgtggctgccggcgaacttgcccgtgccttgcagcccctcaagatcgtctacctggctgagaagggcggtttgttcaacggtgataccggtgagaagatctccgctatcaaccttgacgaggagtacgaccacctgatgagtcagtggtgggtgcgccacggcactcgcctgaagatcaaggagatgaaggatctccttagcgatctacctcgctcatctagcgtcgctattatccaccctgccgatctccagaaggaactcttcactgactccggcgctggtaccctgatccgccgcggtaacaaggtccatgtgaagacctctctggccgactttggagatatgaaggctctaaaggaggtgctgattcgtgaccgtgagggcctcgatgcccgggccgttgttgaccgctacgtcgagggcatgaaggagaaagacttcaagatctactacgacgagcctatggaagctttggccgttgtgctgcccccgcaacccaactctcagatggctcacttggccactttcaccatcaccaagtctggttggttgactaacgttgcggacaacgtcttcgccagcatcaagaaagatttccccaagctggcatggactgtcaaggaggacgacgagaacctgacctggttcttcgataaggccgatggcagcttgagccatgatggccaggtcctgttctggtacggcgccgcgaacggcgaggaagttaagcagctagttcaggagttcaacgcgcacggtcgccaaatgttcggtgacattaaccttgaggcgcgccttcaccgcgctgctgaggctgccgccaacatcggcaagggcttcggcgctagcggtgcttctcttgagcagaaacgtgcgttctcaaccaccaccaacgccctgcgcatgacccgtgctaagcgtcccgccgttgccgtgaactctttccgcacttatgccactaccaaccccaaccctcctcttggagagaagaacatttccaacacccagcccgccaaggttgctctcattggtgcccgtggttacactggccaggccctgatcaacttgctcaatgctcaccctaacatggatcttcgtcatgtctcgtcacgcgagctggctggtaagaagctccagggctacgagaaacgcgagatcatctacgagaatctcagccccgaagatgtccgcaagatgtctgccaacggtgaaattgactgctgggtgatggctctgcccaatggtatttgcaagccttttgtcgatgccgttgacgaaggttccaagacgggcaacgtcattattgacctcagcgctgattaccgcttcgatcctaactggacgtacggtcttcccgagctgattgagcggtctaagattgcccgggccactcgcattgccaaccctggatgctacgccaccgctgctcagcttggaattgctcctcttgttccgttccttggcggccagcccaccaccttcggtgtctctggatactccggggcgggtaccaagcctagccccaagaacgacgtgcagttccttaccaacaacctcatcccctacagtctgactgaccacatccacgagcgtgagatcagttcacagctgggcaccagcattgcgttcattcctcacgtcgcggtgtggttccagggtatctccgtaagtgcctactgatagctcattgattctcaccattgctgacatataatatcaagcactctatcagcattcctctgaagcagaagatgacctcccgcgatatccgcaacctctaccaggatcgctacgctggtgagaagctcgtcaagatcgtgggcgaagctcctcttgtcaaagatattgccggccgccacggtgttgagatcggtggatttgccgtccactccagcggcgagcgcgtcgttgtctgcgctacgattgacaacctactgaagggtgccgctacccagtgcttgcgtaagttgctgaacccatccacttcatcagccatgatgctaacaaccctcatagaaaacatgaacttggctctaggctactccgagtacgagggtatccctcttgactaagctctcactcgaagccagtgacgagtagttatcagagtgtgtttgtgtgttgttcttgcatgtcttttgtctcataccccccgtgaatttatacatcgctctgggttggagatttctgggtgcttcctatctatttacagatcttccatagttgattttgtctacgcttatacttgtgtcaaaagagtgcggtttctgttggtctcagtccattttgctccctagaattctgctgcctcctttcgggttatcggtttttgtcccttgtgcttaactaacatatgggcccccaaaagagcctcgagaaaagtaaaatttctttcttctaatgttgtggttttgcccccaggagtgttctttatcccaggaccatatacgactcgatttgattcattgaacgattggaaacggggaagcagttcaatcgatgtaattagaaaacaatatatgttaatgggaacttttgacttgtactcatcagtgctatagttgtaagcgtggactttatgttgggatacataacgcatctgttcacgcctcaagggtcttgtgctcaagctgggacgcacactctctcttgatcaaccttccactttctccctcttccttcaagttctatcctcattttctgtactctttcatccgtgcttatcgagggtactttcatcgtacctttcactgtctttcgtccaaaactactccagaactgactgcacattactctggcccatgggcaaactcgaggccaccaacctgcggctgtgattcctcttcaacttcccctcccatcaaaaattatttcgcttgaaccgttaacctatccataacccgcatctcagaatccgagccgtgtggagaatcgagggcctgggtttcactcgagttcacttgagccacaaccatgttctacagccatgaaagtaagtcgaagaatccttgtggacgatctttatcgaaataaacactcacctgtttgtcgcactctagtcctcacctcgccagagcatggtgtcgcgacaatatggtaagaaaactcagggcttccacatatccacatccaggactaacaataccctcatcacaggctagtcgcaactctgggatcccggtcgatcgctagaagactgaacagaaaagccatccaggacgttgatgtccccaatgcatgccgagtaatcatcaatccagacgcatttatggctcttcgactgcaggggagcttgctgtaagatctgccgataagtgatgtctccagaggtatgctgacaacgtgcctgtgttaggtacggcgtctctcgagtgtacaatcaacagtgtgggtacacgctgctcgacacacaggcgatgcacgacaaaatggtttccaagttgaagatcatcgcgggcagtgggcttgatcccgccgccggacagaccaggtgattcccactgattcaattttcaagacattggccgaacactaacttcattccagggccagcaatctgatactaccttacgatccgtctttcctacccgagacagctcttccaggtcttgaaattgacttgtcctacttcactgtctccacggaagacagctcaagccaactgagtggtctctggaccaagtcgcccaataatagcctgtctggcacttcgcaactttcaagcctgcaccttgagctcccatcagatgatatcctgggagagggtactatcctagggattgatgagattaatggctctgcgcagaaacaagataccttcggtaacatggcagggttagggctgggaaatgaagagggcgttctccttcaacctgacttcgaatttgacgaggatggtaatatcatcgagctcggtgctagagagcagtctcctcgtggaaggaagtccaccgttcgctcaagggaaagtgaagaaccgatggaggaccaacaacaacggctctgggaagactcggtgagtaccaaacatccatgccgtaaccacaaatatgtctactgactctgttatagatgcagattgacgacaaggaggctagagtggccgagactaacgacatgatggagctcgacacgcagaccgcggttccaacaattctccagacaaatgaaggccaggatggggctgaagaaacaattgagatccaaacagcgaggacccgccgcgtcaggcgcccgaaggaaatcatctccgacgacagcacggcacttcgaaatatgacgctggcccaatggaacaatgaatacgttgcgaacatgatccaagcactaaagcaaaagcagcaaaacaagactccaaccatttcgaagaagaacgctgctttctgggttttcggtcaggggatcggctcggttggagtcggactgggaatggaccatgaactgcacccgctcaacttctactcaggcgaggatctgttcgaagccgttggtggataccctcagcgaaaacgaggaaagcgcagcgcagatgacgatgaaatatcagagggacgtcgagtacgcgcgagagacgaacaagcagagcatctcagccgtgagaatatcgaccgcctcaacatggaagttgaactcggccgtgatgccccttcgagtctatttgacgaccactcgtcccagatgccatggaacatcaccgcttctattcaaagctctcggcaaagacatcgattcggcagtgtcagcgagctgtcttctcaaggacgtaagcctcgaagccgtctcaccagtgccagtccgcttgccgggcgcagctatctcgtgggacaagaccaacttgatctggagctcctgggtgatttcggagacgacctagaccttacccggtatcttgaaggggagctcgcgacagaccgcgagaatatcacctcactctcccccagtaaacgttctgctgtcgaacgggctaagtcaactctcgatcgggaaagcttgaatttcatagagtttatgaagaccaagatgggtactgctaacgatggcaaagcaggaaatgcacaaagcccgaacagcaacgcgtctagtccggtcgcaaccagactcggcccgaccacattcgcgagtcttcttcctcctgggagtacaacgcgagctgtcgcgactcaggctttgatgaatgttctcacgctcgctacaaagggtgtgttacatgtccaccaagacgggtacatcgacgacagtaccgagtgggcagtccgctatcgctatggcgagattttcctacgactggagtgagcgtgaaacgtgcatactaggttttgcgatgcgaccacgaatgacgtcgaggaactcgtgtgcgaatggttcctatttcaatgagaatgaagagaaacggccatgacgattgatctatgaacgaacctattgacgcgatctgtgctggcgtattacatcaccacggaatgcgcagatggaataacatttttacagtgcgatgtgcgtaagagcgaaggcaataactgggtatgcgaggatatttattgcccatcacatttatactccccaatcttaccaggaacctgtatgttgtaactgaatatgtagttgacagtattgcgtatgggatacgcccacagattcagtaacagtaataatacccgatgttttgatcgcgaaccctggaaatggaagtatacgaaagtacgaaagtacgcaagtatacggggacgtatacgaagtataaagatcaataatcctcggctttgcttctgattgtatgagattcacatagaatttgtcttcaccaaatccaatcataataggctctgatccgagtgtgcctcgtttgccctgaattctccgactcggcggtaggcttacatcttacacttctgacatggaggtttagaatagttcattgcagattagctgtcgaatagggattattcaaggaattgctttttattaggcatctattcataagtatatactagtgttatttctagaatatcccgaccggtctcatccagccgatgtaagccggtaagtgatagataaagtgaatggaaagaggctaataagtgaaacatgcactcaatacacattctaatagacttgatagagtaattaatagacagtataactacaaatgtaccataacgacatagatgtataggtaatatacctccagtacaagtaccggtcgcacgtaccgtaagcagtgctccaaattacgcagggtgcgtaacccgcgtattctcccgtcttcgtctttccattttcttttcttctctctccctgacccctccaactttacaactcatacgcgcctttacccattcaaagttattctcgcgaccttctttgcttactatcgtggatactcttcctctcattactcccctaatcatgggtcgtaccgtcgaccaggaggtacacgcggcgtttgtcgagtttcgcgccaaggaagatgacaaggtgcgtgactgtgtatttcgtaatatttcacccacgacctgtccgtcactaacatacggaaacccgttttttagtgtctctccgttcagtgtatatactgccaacaaattcgagcaaagaacacttcgcgacagaaacaacatctccttgaatgtcccggtctgcgcggtcaccccaacgcgcctcagccttcccagcccgcccaggccgcccctaacggaatcggtccccccaatggctaccccggcactcccaatggcccaaccgcaacctcgacaggtccaactggtcctggtactatcccaactcccaatggcaccatcatgaccaatggtgtcaaccctcatgcgactccgttgcagaccccgttgggggccctccagaaccgcgccgcaatggcgaccccggttgcgcctaccggagctccgtctgcaccgccaagcgccgtgccctcgcgcccgactcccaagccaaagaccaagacagcaagctcgagcttgcccgcgcccccactagacgatgtgcacgcagctttcgttgaattccgcgcaaaggaagaagacaaggtatgacgaaggaactgggcgaccatagaccttggaacatacaagctaacagtgcggaatagtgcctgtccgttcaatgcatttactgccagcaagttcgcgcgaagaacactagtcgccagcgccagcatctgctcgaatgccctacctatctcagcgtgatgaaggactcgatccccgccaacaatctgctccacacattccccgagggcgatgtcgcccgatcacttcagattcccgcgccatcgctggagctggatttccgcatgagcatcaaaatgaaccccaaggtgtctgttggtcccagcgtgtggggccaacgagagtgggtttcgttcatcggcggccaatgggccggtcgatggggtaagggtgttgttctggtaagactgaatcccaacctccaatcattacttgtccggtgtctaaccttttaaaaacagcccggtggtcaagatacacagattgtgaccaaggattccactaccaaccttcgtgcgagttatatcctccagactgtcgatgagccacctgcatttatcatcgtgcgcacagaaggatggttgacaggcgccaaggatgttctcgagaaggtcatcgatgccaacatggcggatggggtcaatcccggcagctataagtaccgggtcaatttgtccatggagacgggcgatgaacgatacacattcttgaacactttgatgtggatcggcagcggttgccgcaggggtcaggaaggtaggcttcttcaatgctttcttttgcgattgtcccatactaactagtcatgcagtcatcttcgactcgttccgtgtcaactaggtcaatgcccttgtcaaccaatgatgtcctttccgttattcagcgatttcgtctttttttcaacttcaactttgtgatgggaaaacggtgtttctactttgccatttcttgacacacggcgcaacgtttctatgattcgatccttctcaccacgactttcttcttccgactctctttgtttgatttcgaaccaagggtatatccgccaccctggtttgcacatgccccgcaattaagctgatcttgagctctgccttgtctttgctcttcattccatgtgttttttgcggttcttcttctggtgtaattcttttatggctatctctatcaacatagtcagccttgtaaggtattgctagcttttttttgatctcggcttttcatgtcccatctccaacatccagatttcatatgcaatattccatgtagtcattctcaataggattgaatgttgttccggatctgattgatctctgtttcatgataatttcatgataccttacaaaaaggcaggtaactctagccctggacatcgtacgcttacatgaatggtgatatcactgttactatgcaatctctcaaagcaaagattcgactttagggagatgaagatatctgaatttggaatgtatcttgtttttggaataatatagaacgaaatatataacccgcttgtcatgtaccgcaagaccgtactcaaaccacggtatatacctgtacgtaccaggaacataacgaataccttttcagagaactttgctgtatatcgtattattatttagaatcgagcaattaatttgattttgtaattcatggaagcgtatataaatacaaggataggtattatacactatatcaatctctagcatactcatctccagtgaacccgaactggttgaaaaccaaatcatctgcccacgtaatagcaaacggattcctgaccaggtcagacagcggacttcctagcctcggtgaaagcgatatctgaattgcattgcgctcattggaaagcccttgagaaagactcatgaatttgagggagagtgggaatcgcacaaggggtgactagttagctgattccagtcagcggtagcttttatgggctgaaatcgccgatgtcggatgtcgcaaagagaggtatgccgtcgctgggtatagccgaatcgctcggatgtgcatatagagaaggaaacatatgcctattggtattgggtactttagttcctaatgttgacctcggtttgcttcacatagatccaagcgctaaaagttcctagcgtgccggtagctctctgttgagcgggtcggccgggaccggattggaggaggcataggattctggtcatggctgattgatcttatacgaaaaagatgagcttgttagtattattgaatattgttttcggggtaactctcgacacatggtatttaacaacgacaaaatgaaaaagagaaaataatatcatggacaacctagagtttccatgccaatgacctatcctactactagacacacgcctccccaatcccgagccctttcatctacggtttcaagcctgggttcagtgcctggaaatgcagcacaagactccggtcttcactaggaagtacagtgccccgaagaatcggaagattgagagaccagaagtggccaacagaataatcttgaaataccatgccgtgcgagttgtagacgtcgactatgtcagttagcgggtgtaaacagcagacgaaggaactcgagcttcacttaccgttagacaaagcctgtcgatgctgaggttgttaatacacagcgccagaagaccattactgaatgtccatagcaacaccagattcgttcggaatgctttgtatgaatcgtcgagggccaccccttcgttctcagttggttcttgccagggagtcaaggcccgcttcacagttgacgcgaattgttcatcaatgtcgacttgaggcttgtcaagttcctcgacaaaaggcgtttcatcatcctttttggtttgcgctgagggcagtttttcgggtgcatctgatccctttgtcccccatgaaacatcatgccaattgcaaaatgcatagaccatcagaacattgatcgaagaaggcattccaaggaaatatgcccaggaggaagtgagcatatgccaggggtcggcgtagagtatacttgcaatgaagtaaatcccgtatgttgataccaaggcaatcaaaacaagcccacccgttgagttgaaaaagcccgatatgagtgccgaaaacccatggctgaaatcaaaattgagattctcgggagtcattgcctgcgcaacgagatagaacgacaaaatgaggagatagagctggaccacagagaagtagacaaaggagagcgtgtacagaaactttgatctgtgattggatattagcggagcgaaagatagtaccctatccccaggccctaatacttacccctttggtcgatttccgagagctagaatgaattgaagcataagaaatgtcagataaccgatcttcaacagattattgacaatcggggtagcatcattcccaaaaggccaccctttgaatttgttggtcgcacttggtgtccccacaatatccaaaatgacggaactagtgagccagtaggatgctatactatgttagtgatctggtgtaggattgatttgaaccccaaagagtaccgtcaacttaccgagtgaaagccatgtcatgactaactggcagatattgtaaatcaattggatatgaagcagtagcaaccgaatgataccatgcccactcttatatatccgattgaaatgcatgactgaatataacgatgctgcaaaagagccattcagccatcgtcgccgttgacttaggaactctgctggtcgttctgggacgtctgtttcccctttcgatgctttcacgtatgtaagtagccactggttgccagccttagcaactaattcgaagcaaaggatacgatcctctgcaagaaacatattcttcttaaagatattcattccgtcgatccctttcttaccgagcttctgagctagtgtgtgatccccatgaaaatactgctcaagaggcctgcccataatagcgcgataccgataggcagagaaagcccccggaagtacgctgacgtagccaaaactgctctctaagggcttgtccaggatattggagattttgtattcaaaattttgagctgcaaccaagggattgaggagcttcttccatcggtggccaagaagcgcgtgaatttcaccgcaggccccaccaatatttttatcgttgtagaaagcctgccatagggctagcaaagacttaggcccgggttttgtgcccgcgtcaatcaagatgcatatctccggattcaaaatgcgcccaaatgcgttgaatagccaccgatgtgagttgatcttcttcgcattctttttcttaaggcaaaacatcatttgtaccgggggaagattcatagggtcgtctttgtatggacgcacaagctcttgcttcggcgtaaccgacaactgtgtggtatattcaaactaagaaccattagcatctaaacatttcccttactgaaatccacaagggttggaaggcggggaaacaaacaacatgagcgatcgtttctcttccgtccacatcttgcttcatcacgccatcttgaaaaacgccaatagtcgccaggacgtcaagtgtgtttttatcgcagggatccatgccatcgaagacaagacagacgacaatcttctgccatgcgggaccaccccgatcccaaaattctgtctttttcaatttcacgatgtctcggacattttgcattaccccatgcagggttcgggcggtcaggactttatcttcgttgtagtatgtgacggcaatgagaagttcagtgtgccgattatacatcgaagggcggagattgtaaccattgcgtagcgtaaattcatcaggatcacacgtcgcggcagtgtctaaagaaaatagaataagtcagcttatcatgatatgttcgagtcaactggaacattggtgggaatactcacatctcatttgtgtgaattcttcagaaagttccccctccgcatctcgatactctggctggatagcattgcgtataggactcggtaccggatagttgatactcaagaccgagccttgtgtcaacttgatccgccgtgttggatatcgacggatgctacttcccttgtgtcgtcccgactccttggaagaggacacagcggacccctggtgagaaaggttgtgtaatctgatctgatcaggaaggtcgagtgattccatcgaccctggcctagggctttgaacctcagcagatgaagagttatacggtcgacgagtgccttcgctccaagagattgggtctgtagagggactgagagacagggcagaagaatgggccggatgaagtagggagagggcgtgctcatttgggactctagtgttctggcaaggatgggaaatgtcagttcggcttgccgcatgttcggagatcaagcaatttccacttcatatacacttacctggggcgaataaccatcacttaggccgtcactctcattagtttgccgtacatagtgcgatgaataaggccgatcaaaataattcatcatgtaccaatatgaattcagtactgggggagtgtgtaagctgaaagttcgagatgcaatccctgaaattttttgatgccaagccggttcgaattgattaaggtatgacaggctgtagaaaaatgccgaggaatttgcaggggatatcaatcaagctgaaaataattgaagagccttcccctttccttcccaacatggaagaataacgagctagggcactctaccttggcccaagagaaattaagtataagaggctaatttaagcccgggaccccacatctctgctcgatgagttggccaataatatggcaggtcctcttttttagcgtgaggcttaaacacccttattatcctcaaccagccaatggacaaacccatattataggcactttagttacctgagtacatcatcttggtaaaatttcacttaattaaccgactagatattactcggattttgtgaaatcccacgaggcacaaaattccgattgcgccgagatctgggatcactttgaagtaagacacgcagtgaagtttcatgtattttaagagtgtttttaaaagggttagacccttctaaggataagtacgagagctggttccaaaataacacttcccctcccaaattttctctatgttgttcaaaatgagctcacacttggcctctcccgatcagcgatggaatcagagttaagactggacgagacacagccagacaaagtatcgggcgaagtaattgcacaccaggttaccggctgacttgccaacacattgtcctaaacttgtcggggacagcaacgtcgcggctgactcaaagcaaacgcacggaaactcataacgtatgtattgattgttgtcattaacacgtaaacttcagcttttccaaaagtctcaccgcctctttccttcagactatttgatgtatactagttcaaacagctctggtgtaactataggaagcggggataatattctccgattctctatcacagtcagcattaatcaaaatcgaaactatgtgactgaatattttcaatatttctcagattctacaggtgattgaatgtgttctcaaatggctgtctgaggctgattaaaaagggttgtattagccatgatcaagataaataagaagggctaaaatttctgcattcaccttggatcctctaacgagaattgcgagccttattttaagctcataacttctaacattgcagacttcgaagctcgaagtctcagggggcagccagtcattggaccatatggcatcccccaaactgaccgttgagtccgaaggagcatctttgagacctatcttagacgggaacgtttatctcttgatccaatgatctagggaaactcctatcaagttaagtctcatatcatcggaagaagatatgagccgtacttagggtacatgacgcatccgcagtctcccgtcgagtccctgtttgatctgcagggaaagcccattatctgagttgtgtttcccgagtttgaataatccatgtcatatataccacttacccactttttgatgcgttccaacagcagagcacaggccttaacaataaccgctgagaattacgtagtgggaaggggaaatgtaaagtacgatagggacgagcaggtagagtgtttatccatgttattctttgctaacctacgatgtttgggttcgtactgagaagcccgagtatcctacttcgtacctcgcacggcattcgaggtgttatctatccccctgcagaaatcctcgctctttcattgttttgtctcacaatatagagctttcagtgaagaaaaagcaagtccaaactatttatagacctaagtacccgacccttgtggactaaattaaaagattactcagtcaaattgtccgcgctatccaaatggtacggatggtagggtaatatcatagccacaaacgcagtcgtttagagatgctgtctcacaaagtcagaagaatagttctggcaagagtatcacaccttcgcaggatcacgaattcagtaacttgaaaaaagcaaatctgaactcagccatgagtagtacaacttgggccgattttcaataaggatcacacaatctaggttgatagccagcccctttctagtggctgtttgttagtccactggtttcattacttgcagatagacaagagaattctcaagacgccgatgaatacgaccctaaagaaatataaatattatcaccctgctgaccttgagttagactcctctagtaccatttcacatttgacattcccataatcgagacatagttcgtccaatttcaatatgcgtctcaccttcattgtatttatggccattatcggcgctgctttggctgcagacaaggcccctcctacggtaagttctaacaaatgaacgtcagataccattaaagcctctaaacattctttagattcagaacggatccccttgcaaggccgatggcagcgcaggaatctgtgccagtggcttctgtttggtaggtttcttgccttgctgaaaatgttgtgacatcaaatattaatatgtcatacagcaacttgctcacgacaatgagggagtatgcaagtagactacggatctcactattggttttaattgattgacgatgcggcatttccgctcaaaggaaagccttcaggggatacagtatggactactcatatgggtgggttgcttaagtagtcgatgtttttagctgaatatgattgactgctctcggatttggagaaagaatagcttccctcagctcaaggctccagttaatcgcggctctcaactcagaacccgtacaaggctgtgaaacagaatggtatttggttcacctgaatcgaccaaagtcactggagggccagctgtgacgttctacggataggttgcataataaataaaaaaggaagttgtgacatttgcacctcatatgggctctgttttcggatgtaattcaatatcaaatagtcgctagtacaaatgaacagttgccaatatataaattttgaatcagagttagaaacctaaggttcgttgttagcaatttgattgtttctgaaattggtgcacgagaacctacccttttccgtgttaccatcacccatgctcttgctgctgctgcttccgctctggatagcgcccaatattccatcaatgtaaggcgcgccactccacttctggtgggtgagaacgtcgacaccgagctccttttcgcgggcctggacaagacggacataagccaacataccctcatccttgaatgcacgggaaagttcggtcgtgatggtggcattactatgcagaccagccaaggaaatgagctgcaggacaaatctgagaaaggttagtggatcgaagcgaaatagttgcaatgttgagcttacccttgcttggcaatatcccagacaaaggatttgagggaggcctcatcaaatccttgccccatccagttaaatgaagggctgaggttgtacacaagcttcttgcctgggtacgccgcccgcacttcgccggctagctttccggctttctcaacatctgggtcaccggtttcgacccagagaaggtctgcatacggagcaaactccttcgcgcgcttggtcgcggcagggaaccctgcggcgtagtggtagaatccctcacgagtgcgcgggctatcacatgaccacacaacaggccttttggtgtaatcgttcgccagggcacggcgacgggagaaggaaagatcggggttcttcttaacaaaggccttgtacgcatcgcgagatgactggggggcgccctccgactcaagatgagcatcgacagctacatattattagtgaatgggatcgcttgacacagaatcaatagacataccttcgtcgaatgtaacaagcttatggctcttgacccagccaagttcgaatgcgtcgatttctttgggtgggacgccctctcgttccatagcttggagggtctcggccagaggttccacctcctccgtaataccaaggatgaattcatgatcacgcacatcgatggcgctgctgatgagtcggccgctctcggaatctgttcgagcaatgaccaggttctcacatcccatcatatcccactggaaccgagctgcgaccagtcggttgatgtgttcacccactgggacgagcactttgcctgcaagatggccgcacttctttccgccgtgcaattggtcctcaaagtgaacggctgcggcgccattctctgcaaatagcttggcgagtttgagaacagccgataagccaccatggctgcaccgagatagttagtaatacttcgtgcgttcaatcccaagtattaacgtacccggtgtcaccatccgcaacgattggccggaaataatcagtgtaaggtgtggcctttcgctcttctggggtcatctttcgcctcgcgtcccactgttttcggtcgtgcatggactgagccttgaacagacgctggacctggttggggacggtattatagggataatcgccgaaatccggtgatacttcattggtacttgtcaaaagtgaagagcaagcccagcctgagatgtatagaacctcttggttgggggcttgctgcgtcatttggacggggtcaatagctcccacttgtgtacggaaacgagatcagatttgccacaattggagctcggccggtcaaggactcactggtatgaacgggctgaccggcagctgctcgttcgttgagaagattaaacagcttccgcgccatcaaagaactgggatatgtttgttgcaaggagccgcgtttgctcacaacatctgccgccgtgtaagggcgcttgatgccttcataacgaggcgaattccaccatgattccacatcacgaagctgttggtcgtaaagggcatcttccgctgcacctgctttttcttgtgtggacagcagctggtattcgtctgtggggaggacggtggatacggggggctgcacaggcgtcatccgagtataaccgcttgtgaaaggtcgcaatgaacgcgcagaaatagtagacacaacaggaacacgtcgaggcagacgtcttaccgaacggaacatgactgacagtaataatggaagaacaaaataatggttgaattgaaacagggacgaaccgaaagaaaaggaactaagaagcaaataagggctcctctttgacctcgggccgtgaacatctggggtttccccgccacttgactccgaaggtccgaaattcgctacatgactaagcgtacggtcaatggatgttaactaccgggacctcgggcctcgaccaacaacattggagactacgacactgcttcgtacatagtattcgtttatgtgcagtctttttgccttgctcgtttttcagtgccaacagtctttttacagctgaatatcccatgattgtcggtcagcggtcaggacagtatgctctcaaaatgtacgacctcattggaatggtccttattgtcatatatgacgactggcacctttttaggttgacattgtctatgagtaaaggatcttctcatcgagggctctgaggctcccaagtctgtgtggtaacgaatgttggaattcttgtgttttacgagccgtggtaaccttgcaagtgcctcttggttaggtatggcctctagttttaccacctgacttcgaggcattcttactgcattcgcctgtagtctgaccttaacatctatcaatatcaactggcatcactttcactttggcctcacattgtcttcacttcaatccttcttttatgtaggcgtgttggacctatcattcaaaagttgattatgaatactacaatatactactaattgcagccaggatgtcgaacaattctaaaaatgtcaattttatactcacaataatcaaatcagaagattcagatcacaaggttagctatgggatatagcaggcactggcgggtgaaatgattgaacaatgccattcaaaggctctattgaagcacatggctatccaagtctattgttcaacaaccgatctattgagcggattccttggggcataactcaatacacattatgctcgatggagacattcagcttggagaaaaaatagttgagctttattcatgtcgactatcaatgggctcagtactgcttagccgtatataaacctccaaaatcctctcatctagtcctttcttttccctcttcaaatctcaccaatcttctgcctcgctctcccttcttttcttcttttcttttttcttttttcttttttgtttttttttttttctttttttcgaaaatggtgctggacaccatgcctccgttctcgaagagcggcctccagggannnnnnnnnnnnnnnnnnnnnnnnnnnnnnnnnnnnnnnnnnnnnnnnnnnnnnnnnnnnnnnnnnnnnnnnnnnnnnnnnnnnnnnnnnnnnnnnnnnnnnnnnnnnnnnnnnnnnnnnnnnnnnnnnnnnnnnnnnnnnnnnnnnnnnnnnnnnnnnnnnnnnnnnnnnnnnnnnnnnnnnnnnnnnnnnnnnnnnnnnnnnnnnnnnnnnnnnnnnnnnnnnnnnnnnnnnnnnnnnnnnnnnnnnnnnnnnnnnnnnnnnnnnnnnnnnnnnnnnnnnnnnnnnnnnnnnnnnnnnnnnnnnnnnnnnnnnnnnnnnnnnnnnnnnnnnnnnnnnnnnnnnnnnnnnnnnnnnnnnnnnnnnnnnnnnnnnnnnnnnnnnnnnnnnnnnnnnnnnnnnnnnnnnnnnnnnnnnnnnnnnnnnnnnnnnnnnnnnnnnnnnnnnnnnnnnnnnnnnnnnnnnnnnnnnnnnnnnnnnnnnnnnnnnnnnnnnnnnnnnnnnnnnnnnnnnnnnnnnnnnnnnnnnnnnnnnnnnnnnnnnnnnnnnnnnnnnnnnnnnnnnnnnnnnnnnnnnnnnnnnnnnnnnnnnnnnnnnnnnnnnnnnnnnnnnnnnnnnnnnnnnnnnnnnnnnnnnnnnnnnnnnnnnnnnnnnnnnnnnnnnnnnnnnnnnnnnnnnnnnnnnnnnnnnnnnnnnnnnnnnnnnnnnnnnnnnnnnnnnnnnnncccctccccccccgccggccagctgcagttcgcagctggcaacgaaaatgacatccttgaccgaatgggggatgtcgagtatcccccttcgcctgttcgggaggatctggagggtgtgctgcccatggagggcgttgattttgtgccggtctccggtgtctacattgacaccatggtccgggatgtctccccggacatggatgtttgcgcagagtctggggccgtgtctgccttcgccccccctgctctgactgtgccttcctccgtccctccggtggtgccctccctccccgtggccgcccccgccaccaacaagtaccggcaacggtactagttgcgtttgagaagactgtgtgtgtgtctgtgccctgattttctggggcgttagctaccgtttgttttgtatatatatattctcttaatgaaagatatttctcttcacttttgttttctctacaggatattttttgtcgtagccgataatatccgtagtcctaatggtgttggagaaatgatccccgcacgatgttgttaggtattgtttatagtgattgatatccacatccacatagatatatccacagatacccgtggactcgggttggaaggacacacgagctccttcaactcggcacagcgtagaatccaatcagacatccgcgatggccgagccggttgagattgaaatggaaaacgcatctgggattctccaagatcggcgcccccgcatggcttatcatctcctctccgtgggattccctatcttccacttaccattcgctgtcagcgcctcttatctttctgtcttcatctccctagttatttgtgtatatctcgttttcttccgtttgaatgggttcaacatcgacttggtatggaaagcattaaattcccaccgattttagacccgcccgacaacccggcatcagcgcggggaaatcttgggccacaaaagccaaaacagacaaagagtcggaatggtaagtaagaatacagtgagcctacgtcttcctgttaacgaggcaagaacaacgaagaatgttacttcatcacattgtttacaagattgactcgagtctccacttttataggttgcatcacctgcaaggcaaagcggttgaagtgcgacgaagtcaagccatcttgtcaccagtgcgaaagacgaaaggtccaatgtggaggatacaagaaagacttcaaatggcgaccgttcgaagagatcaacatggcctctgggcggcctaccgtacccaaagccaaaaagggtaagtcacgggtcgtgtgagttagcctggtatactcacgaatccttttagcgaactcttcatcccatcaagcttcctctgccgccaatattggccagtcctttccgactcctccgacgactgaacaatcggcatcgccgattcgcatacagtcccacaaatttggtggctctcgttcgcctccaggctctcctttgcatagctcgccccttagtataaatagctttctttccacggaagcccgttctcttgaagatctacccgtcacacgggaagatgcttccatggtagagtgcaatgaacctccccttgatatcaatgtttcattgtccgccgactctccccctttcaattttctctccttcttggatccttttcaggattctctgtcgcttgcaaaccccttgggctctgatgtcgataccgatactgctagacatttgccgttggttccagacaagccagataccgatgcatctaggctgagcttctctcagctattggaggatgaaaacgatgacattgaggagatcatccggaaatcggatccagcattgggaccttggaatttcgccctaaccgagggagactctttccatattgaccccccaagcatgtcagacaacccatctctacccccggaaagtccggaaatgctcgtgatgcggtttgataaactcacatgtgggattttatctatcaaagatggttcattagagaatccgtggcgaacactcatttggccgttagcaaaagacgcgcctgcacttcgccatgctatctttgctctgacagcgttccattcggtaaagcaaagcccgcaccttcggatccaaggagccaaacatatgcgccagagcataaatggtctagtcggacaaattcagaatatgagggcggatactgcgctggcgactagtttggctttggcatttgccgatacctgggaccaaaacacccgcacatgtattcaacatctgcgaggcgcaaaaacattgatgtgtcaggtgatcgcggccgggatgcaacgaggtgttagtgatgaggagctggatcgcatccggttcctctataacacatggtcctatatggatgtgatcgcacgactgacttctttggatgaatgtggtcctcaaaactgggattcttcggttttcgagcttccaagtgatacagtccatgatattgatccgttgatgggctgtgcaacgactctataccctcttataagccgggttgcgaaactgatccagcatgtgcggaagagcacgtcgaacacggtgtcggttgtggcccaagctatggaactcaaagctctcgtcgagcaatgggagccaccgcaatggtttgagccaccagatgaccccaactccgaggttcagcatagtattcaagttgcacatgcctatcgctgggcgacgttgctatacctacatcaggctgttccagagataccctccgagccggccgatgaattagcaaagagggtcctgatcttgcttgccactgttccctacacttccaggactactatcatacaaatgttccctctactagcagctgggtctgaggttgacactgaagatgaccgaaaatgggtcttggatcgatggaccacaattcagtctcgattgatgctaggtggtgttgatcgctgcttggaggtgttgaaggaagtctgggaacgtcgcgacgcaatgaatgctagaagagcgcgtgaaatggccagttcgcgacgtggcgagtctttctcatctggagatagggagaaaatgagctcgtcattgccagccgatttccgcaaatacagtctcaatggttcccacaaggggccaactggaaggccaggacaacctacatcgaggtctgcgcgacggggttccgcactcgccccgcttgaaaacattgaatttgaaagaactgtgcgtggcagattgcattgggtgaatgttatggctgaatggggatgggaaggtgggtttgacaactttcaaactatttcctccaaaagctaactctgcaactcatagttttccttggctagcctaccagcaatgaatggcccaaaccttggttgaaattgggtgccatgcgaaaagaatatactgttctttgcattctagcctgctgcactaatatgacagctaacaaagcaagcaagtctgagttcttgtttcctgatttttgttatcatgtcctcattcctgtgtctctactttatttgtcctaaggttgaaattgtacctgacttggtgttgccttgaaccagcgcggcgtctagggagtctgttgttctcttgttgatgagttacgacaacgatgttttttttcgattgagacttgttttctacaactgtggtcgtcgctctgacaacgaattatggttgatctaggaactaatatgtccaacatgatggtggtttatttgacttccacgctttcattcagcttttcaatacgcgatacccattccggaagcccctaagcgactacccagtttttggcctattgatataattccccaatgctgattctctatcgaattttcagtaatacggaaaccatgatcagccctatcagagtcaggctcatcatcttctttgccatatgcacccgatacatcagctcgcttggccattattaccgccctataccggaatacctacctaccaacactgatcatccgacgaaagcagtaacccacatttgccttcgtaggcgcgacccagcaaggcctggtctgatattgtcccaactgcgaaaatgtaaattccaggaagctatattttcagagagactattctctgattcttacaacaatctacacgatacccaagtctctggcttcccttacgcgctgaggaactatgttcttagccagattcttgggtggccctgatacagtacgtcctggtcccgatcaaattatgaagttctgggagttcacaatctatcaggatttgctcattacatcgtgacatctttagagttccttaaatcaaattgaaaggaacgacgatcaatatccagatgcatttggttgttgacgagtgcccctaggcctagaggcgattattccccaggagataccgctcaccaattgctgatttgtaagttgagagttttagaatttcacatccatctaatttgcaataggtgcgtgaaatccggatcccctcaataagggaatacaaactgctcagcttttgcgccaagaataggtacgaaatcttcaccctcacaaatcttcatggccttttgataagcaggccgatcaccaacacgcttgagataagctagaatgttcttatgcttctccccatcaaactcaatcggacaaaatcctctcatggtagtgagagtacagattgccatgatatccgcggcggtgacgtcattcccaacgaggtaggatccggtttcgccgagtctcgcctcaaccattgagagcgcacgctctagtttcgcattgcccatcttgacgtgcactgattccgggtcgctggtcaagcgccgggttatcaggacacggaataaggttggctgtagggaggcattcgcccagtggtaccactccaggaaatggatgtattcgtcgccgtctttcggtgtgcgcgcgagacggccctctccgtaggcggcgataatgtaatcaatgatagcgccagattcagcgagcacgaccttgttttttgtgaagggagagctgtcgtcttcgatcaccggcgcagtgccggcaggatgcaggtctttgattgattgcggggagaatatagggtcgcgcttgtggaaaacgaagtcataatcgatgccaagttcttcggcaagccagacgatgcgctctgattgcgagcggccaaggtggtggattgtcaatggcatcttggtttgggattgagaaatgatgaaggggtgttgggctgttggcgatgtgggatgggaattgtgtcgagaaaccaagtagtgatactctgtaggatcgtcggcatcgtgataggggccgtctccgcttgaccttcaccgagattcgtcaaattcgtacccctagatctcgacttggacagctccattacttgagttatgcggcaatcggatttcgtcaactcgcggtttacatatatgatcttagtgaaatggcaatgaggttaactatgagtgtctagacccactcagccattaaccaatacatgttgatatttaagcgcttcgtctgtctaaatatgcataagacttaaagcgaatacggaaactagcggagaaaaagtaccattaaagctgattctctgaagatgcgtcaaagcgggggatgcatgaagtacaggggtagcgttctcgttttgccgcgtccacatcacctctgtggtttgatcctgtatctacccacttacctgaatagctaccctcgaaaataatcacccgaagcagcattgcacagatcactcgtgtccgtcgatttgacatgatcaacccccaagacagattttggtccgacgcccaagcctactgcggcagggtcgaagaccctnnnnnnnnnnnnnnnnnnnnnnnnnnnnnnnnnnnnnnnnnnnnnnnnnnnnnnnnnnnnnnnnnnnnnnnnnnnnnnnnnnnnnnnnnnnnnnnnnnnnnnnnnnnnnnnnnnnnnnnnnnnnnnnnnnnnnnnnnnnnnnnnnnnnnnnnnnnnnnnnnnnnnnnnnnnnnnnnnnnnnnnnnnnnnnnnnnnnnnnnnnnnnnnnnnnnnnnnnnnnnnnnnnnnnnnnnnnnnnnnnnnnnnnnnnnnagggtcgaagaccctgccaccaaaacttattgcaatgtctgggattgggaccaactacggatgatcaaggtcaaaggcaccgccaagctgtttccgcccgatgggaatattgagccctcaattttggcaccattagcggattatctatcgccggaagttcgcgcaatcacagtcgacgatgatgggctactcactgaggtatcgacggatccaggggaggacgacaccatgtttattgcttatcctcgcctctcactctgtggatcgcttgcaggttgccgtacaattcagtactctaaactctgagagctcgatcggcttgggccatttgttggtctctcattgtacgaagacgagtcagggactcaaaaggtcgctttcaagtttgacgtcttatataaggctctatgactacaaatggcctgggatgaagttaatattctcaaaagtctaccaccacatcctaatatggtaccatttgatcgcgttgtcctcgatgaatctcgggtgattagtttcacaacaaagtacatcccaggtggaactctcgccaatccaaagatcccttttcgatttgagtggctacaacagcttactcaactggtggatttcctcaaccttgaatatggaatcatgcatcaagatattgcaccccggaatctacttgtcgacctttatacacataagatccttcttttcgatttcgattgggctgcatgtggagagaaaaacctacaagacggtcgtgatgacgttagtagcgttgtgctcacactctacgagcttatcacgaatgatacgtccttctcggatatcctccactgggaacgaaatatggacatagtgtcaaatactcgatattggaaagcagtgtgtggagaattgttatgtaaaattgcttgaaattgttatagtacacctatcccctgcacagtcgaccaatattttcccatttctcaagttcgactatcctctgtgtgtccgtattccttttatgccaagcattaaaagacactgatgggaagggctaaccgcatgaagtaaaagaatccctactcaactacacaatcttatcactggaggtaggctcacctaggcataactagtagtagtagacgatgagacatcaataccgtcgaaactcgggaattttctcttgattgataacggcctcccctaccattctcagatctttatctcaagcttgtacttcccctcatcactagcaagcccctcaacctctccgtgattttcccaacccattctccgttgggctgcctagtcaggatatcagatccgactatcgctattcgtctggattgagttaccctaagtttgggggagttttctttctagatgacatcccctcatttcgtacatggcagagcgcggcaacatcagtataaagcagaggtaatcctcgagaatggattggaatatcgatttatttctatactagattcctcatagtcagactgattcctcaaaccatggcagttccatttacctaccacgctaaggcgcaatccaccttcaagccgccacttattgccaatgacaacgccttcttgggtgatgtgcagtcaaggtatggcgatacttgtatagataatgtttcaagtaagcaattttgttgacatactacagcgagaaggaaaacccagacaagcccatgtcatgcggcttttaccgactggaaaagggtacccccctcgtctacacctacacctacgacgaaatgaagattatcgtcgagggcaaatttgagattgccgacgagacgggccagaaggttacggcgactccgggcgatgtgttttatttccccaagggggcgacaatcacctttacaacggatgactatggactggcgttctatgtgggtacccagctgaaatccgaatcatattccaacggacccaactaacgaaaccagactggccaaaggaagcagggcgctgcttgaggatataaggattaataagattaataagaattttaaactttttattttttaatttctcattttagaagtttccggttccgtggttgggcttgccaattatcggggtccccgtgcctccaatccatggaacactcggctgtgttgggctagttatttcccaatccggtagtttgcttatatatcccttgcaatagcttcatgattccggtggctgcacccgactaaggcctaccatagactacctacatgtacatatacatatgtatcgcccggacaattattgcttattcccccgaacacggggatgtgcgacattcgctagtctggattatgcaaaagtcaaaacccaaagtgcccacttcagtggcggtttcatgttgggaccccatagagtcaatctcacttgagaggagccgtcaaagcacaagtagcgattggaagtggagatgattttcagctcgcttcgataaactcatccactcggctggggtttagggggggtttaggcgggtttttcatcagtgtgcatgacgtggggggagttgctacagcaactccgtgaggaagggggggatagagtcgattgtagaattgagaatcaagatcttctgagatcttggtggagagggatcgacttggaaataacaaacataaaccttccaatatttccgagggacaaaggcattttcctcctttccttttctcttcccctaaccatcttcgtgactttgcctttgttctggcgtgttagtgcccattagttccggccttatcacaggggtcatcaccaacccctctatcgcttcgacatcaacaccatggctattattccagacgaccatcttggtctccgactccctaatccaccacccttgttgcatactcgtgggcaattcgatcgccccgctactcctgccgatggctttaccagtccaccacagactccccagggtagccccagcaagtcaaggttgcctccgggcgcactcgacctacccaatgtcttcgacaaggcgatgaagttgaatcccaccaccccctccaaatcgacatacaaccactacaatcatccaatgttctctgctggcaagagtggcgaggacttcagcgagagcgttatccaccaaaccccttcgagcccaacgcgtagagccaacaaggagaacacaccccccaacccaacacgtctaaaggacctgggatcgaccccaactgctgcagctctttcgcgccaagaaccataccaaccacgcgatgatacgaccagacgccaggtgcagatgcgcggcctgacccccgaggaaatggagaagctagcacagcccaaagtgaagcgcctcgtcaatgtgacccaactctgtaagtgcggcccgacctgataattttaagacagattgactgattcgtgcatgacagacttccttgaccattacttcgatctccttagctacgtccacaatcgccaaacccgccacacacaattcaaagccgcttaccccgaaccccctgctacccctgacgaagagtacgaacccgccctcctaaaatacctcggccgtgagcgcgcacatctgcggaagcgtcgcacacgtctccgccagggcgacttccagattctgactcaggttggccagggtggatatggacaggtgtatctggcacaaaagaaggatacgcgcgaagtgtgcgcgttgaaagtcatgagcaagaagctgcttttcaagctggatgagattcgtcacatcctaaccgaacgcgatattctcactgcggccaagagcgagtggctagtcaagctactctatgccttccaggatgatacgcaaatctacttggccatggagtatgttcctggtggagacttccgcacgctgctgaataacactggcgttcttcataatcgacacgcccgtttctacattgctgaaatgttcagctgcattgatgcgctccatgtgctaggatacattcaccgtgatttgaaacctgaaaatttcctgatcgactctaccggccatgtcaagttgaccgatttcggtctggcagctggtatgctgagcccgggcaaaatcgagtcaatgcgtgtgaagcttgaggaagtcgggaacacccccgttcccttcggtcgacccatggaacaacgtacaatggccgaacgacgacaaggataccagtctctgcgccagcgggaagtcaactacgccaagtcgattgtcggatcgccggattacatggcgccggaagttctcaagggcgatcaatacgatttcactgtggactactggagcttgggatgtatgctgtttgaggcattggcaggctacccgcctttcgcaggcgcgacagtcgaggagacatggcagaacctaaagcgctggcagaaggtattgcggaagcccgtctacgaggacccaaactacttcctgtcacggcggacgtgggatctcatcacgaagctagttgctgggaaggagcagcgcttcaagaatatcaaggagattcacgcgcatgactatttcgccgaggtcgacttcgagggtctgcgtgagcaacgagctccattcgtgcccgaacttgattcggagactgatgctgggtactttgatgatttcagcaatgaggcggatatggccaagtacaaggaggtccatgataagcagcgggcgctggaggatatggccgatcgcgatgataagatgagcaagggcttgtttgtcgggtttactttccggtatgttatgctcaaatccatgtcgttctcttactgaccactatagtcatcgcaaacctgccgtcgacagcaacggccgcagcagctcgccgcggaagcctatcgcgacggatggcacattcggcacaatgttctaggttcctggacaaaatgcagacttcacattcatattcggtcaatccttttctcttcttgcgttccactggcgcgtgcgggactccgagctggatcttggtttccttgtgccagatgtcccagtattgagtttaatggctcatattttctcttctttttgttttaacttcagcctcattttcgacttgcaacctgcaacgtgacacttcttctcgactcgttctgattttatggtgcgcgtggagttgtggaattcgattcttgtatgatacagccatagatcgaaaatggcgcagttcctgccttctgctagtaatggtttcattgtatggaatatggaatatgagattgatctcgatcgcgatcctgtgccgagcagactatatgtagcgcatatatcttaccgcagtacggagtaaagtatcgactcttttagtttacaggaagctggcgcaccatgcgtaggatctcggacttgtcgtctccaatgacagcacgaccattgacccagtcaacggtctatagagtatagtattagcacaacatatccagaaagatctccgatgtaacaatgggagtaaggaaaaggtcgaacatacaataggcctcacgaaattctcattatcctccttgaacttcttcaatgcgtcctccgcatcgcgggcgcccttcaccagctccgcaacaccatacgtcaccttctcgccgggattgccaacaccgctgacgggcgagatgtagtcgaggatgctgcgaagctggtctgttgtcgggggcgaggtggtaacctccagctcgaactcgccgcgctgttgctttgagtggttggtgtggtcgctagcctggtcttctgtggcggtttcgccagcggttgcggaagcttgtttcaggatgttgagggttctagtcgatgcttggatggagggggagtggaagagggtgatggggtcgagggttttgctctgtttgtgagttagatggtggtttggcagctaagggggggggtgaattggtgggtatggaggttcatataggcagacttacgaagcggaacatcttgacggtttgggtatttgcaatttggatgtgttttggtgatagaggtaggtagaatggagggaggtggaagaagtggagttggcttaagctgcagttcctggatgatgtcatgtgctggctcgggtcgtctcgggctaagctgcgctggtccgaacgcgtcaacttgatcttctctttctagtgtatattgtatgctacgaatactacgttgagaatttgagaaatgccatggggtatacagaatcattttctatgatcaggcttctaccgcctaacttggagcgatggcgtccctatgtcctatcaactctcaactccccattttgagaagggttttgaacatctctcaacatctaggactttatctaggcgacatagcctcttactgctcattgactgtccccatgcagtcgattggcctttttgtagtaggactgagcgatgtatccaatgcggttaggaacagaggctgttggggagggcgccaagtttcggggttgcgtggtattgtacctcactcgcctccagcgagtatcagattgtcacctttagtcattcctcttgttatgcctgcatatactcattagtgacacaccaaagtgccaatatgcaagaatatggacatacccaggaaatcataaaccaaagttctcaacatgcaagtagataccctgcgcgccagttcctttgtgcacagctcgttcatcgctcagagaaaccacgctgcggcggacatcgtctgctagaccacgaggtccgcacacaaccacggcactttctccttcggctttctcgaggaccttgcggatgatgattcgtggcatgggacgaccggagataatgttggaataaataatttctttgcttgtgacttcttcaggccgaagagacttcacatccagagcagccttctcagactgaacaggtgctgggccagagcaggtacaggcacaggcagtattgatatcctcgtcttcgatttgcgcagtgcaacagcaacctccaccagggagacacccgctacctgtggcaacgggagccgaggtcgatgtcgactcggcagagagagaattaatcgagacattgtccttctcggatatattcttgccttcatcctgggcaaaggtctccagcgtaggcggagacactgtctgtgatggtagtgagacagatataggcggatctagcttttcatcgcatgtaatataaatgctaatttcaatttccatttggaaatttgaacgtgtgcgtcgacactcactcacgtctgccagcaaagattgcagttcggaatcaaagtaagtcagctgagaacgtgatttgattacccagacaaagcgtaaccgcttggtagctgttaaacgagcaatacgggcaggcatctgctccttgctgccgttgctctccagcttccatgctgagacaatatcccgcagaagaggcaccgtgaatgtcgcacccatgccacccgccagcagtacaacactgtcgaactgccgcaagggccggatgcttccatatggcccttcgataaaaactgtcgaactggacattcccgccacttgtctattccccaatagactatcgctctttgaggcgtaccggaagaaacgtctagttcccccattctcggcacgaataaagaacttcatcctattatcttctggaatggatgcaatggtgaatgggtgacattgcaatggagcgacggagtggcaagtgaggaagacatgctgaccgggttgccacccgataccggggttttcgatagtaacacaagtgacatttccaggtagtggagtgaatgtagccgagtgttcccaaagagcattggccttattctttcggtggaaaatggccaagttcgcatatgcaccccaagtgtagcgagcaagccgatcgaagaccaaaagcccaattgggatccatacccagaccttgacttcattaggcgcatgcatccataccgcaacaataaagccaacaaaggtgattagatgctggatgacaaagaactcataactgagccgacggattggagcgaaggaagtgatcacaataaaggtcagaataacccaagcggcaaacccacgcttcgtcaacggatcgttatagagctggtacgtgatataattccagcgaccccaatcacggaaccagaatcccatatggatggtggtagtcaaccacagcgtccgggcaacccagcgatggtaccagttcaaactgacgtagctcattcctgccaagaacccaataatgttctgtctgcctgccagcagaaagatcagcggcaactggcaaatggcgatgaaaccagtgcggtagccaacatcttcccatttccatacgtccgtagtgtccagcttgtagaaacacaggaccatgactaccaccaggttggctaacatgatgagaacggggccaagtggcgggaaatggagggtcaatcctccgagtcgaaacggccgtggagtcgcatagctgacttcgcggactgttgctgtgacggtggcgtagagattgaagaacagagattttggtttggcgggcgtgagtgaagaatctcgcaagctgattattgtcagtcaagatcaccggatgtcaaggcacaacataccgatggctagcaataacgcgatccagcacgttcacaagggttgctgccccgattgcacttcccacgacagcccagtacatcttctgcagggtgaacagactgggaatgccatcgcccatggacattgagcccgcaggcatgtcacccattgccatggacatcttgtgctggatgtgtagaagaaggcatgagatggaagcccactaagcatcacccaggtgtcgaggtcaccaatgtcaccaataacagagcagattaccaatattatgctcatccatgctcacctcccgggtttgggtcgaggtggggtccgccatgtggacacccgtggcaccgttgggcccaatgcggcaatgtgtaacttcctgtttcgaaggttatttctcttcttcatcttctgttgattctcatactctctctccttcctcaatcatagaatcaatcagaagacatggatatgaccagctcgacctcacacagtatgagctcctcgacgagctctatgagcatgactatggtcttcaaaaattcgcacgacacgccgcttttctccaatgcatggactcctgcatcctccggtggctttgcaggcacatgtattttcttgattattctcgctatcatcgaccgatgcctcatcgctttcaaagtaaccatggagcgccactggctcgccgcacatctcaaccgacgatatgtcactgttgctggcaaaagcaccgaagctgccaacattgactccgacccggatgcgaaacttgcatcgcttatcaccgcgcagggcgttgaagagtcagtcaaagttgtgcacaacatcactcatgggccaattccctggcggttcagcgtcgatctaccgcgagcagtcctgttcctaggcattgtgggcgtatcctatctactgtaagttctagtatttactggtattagggcaaacgctaataccacgtccagcatgctagccgtcatgactatgaatatcggctatttctgttcggtgcttggaggcgctttcctcggggaattggcggtcgggcgctttattcaaactaatgagcatggccactaaagatcttacatttgactttgatacgttttgcgcatgtgggaattatttatgaacttgagcagcatctgtctggcgttggggataatatgatacggattgacttgactctaattgctctcatcataaatctctcttttcttttccccctcctcgctgtctccgcggtccagagctgcatgcaatcagatgactaaaccctgcgcgcgcaattgagctaatttactaaccggatccggactagcccgtcggtaatatccacttttggcgctagcgtaaggctttaatttactttggtctgagttaccaaaaacagcaggtacaggccgttgtatctgacatatgaccattgtcgagaaattgtaaggtgtctggaaatatgctaggtgaagatatatgattatccagtatagcgtggtatggaagcatcggggagtgaagttcaggctatgggagcctaaagaccactccataaaacaggatcccggtgtcggatgattccgaatcatgcagtctcaaaggggaaagggtcattattgccggtatatcggatccaacggggcttcataggtggaccctgtttttgtcaagtcccgctaactccctcaccttgtacatatatgcagaactcgtatagacctccggggttcaaagagctgagttttcccactttttctaggatatctactcctgtctgattcacttgctacacttattccagctcttctattttaatacgccaacatactcccaatgaagctctccctcctcaccttcacggccatcgtgccattggctgccgcacacttcaagctgatgtatccaacctctcgtggcttcgacgaggataccatgcccaattttccctgcggtggaatgagccagtcttccaatcgcaccaaactgccactgtctggtggctcattccccgtcgctcttcagatgcaccattcccagactgccgtcgaggtccttcttgctctgggcagtgatccgggagataacttcaacattgtcctctcgccaactttccaggtcaacggccttggtgaattctgtcttcctcgcgtcgagatcaatgagaagttgatcggccgtaacctcaccaatgggatgaacgctacccttcaggtgcagaccaacggtgacccaagtggtggtctctatgctgtatgttcacttccgaatttggcggtttattgcggtatactaatacaatacagtgcgccgatatccagttctcttccgatgtcacgtatcagacaccatctgcctgtagcaataacaccaatctcgctgccaccgccttccccgaggcttctgctgcacgtaatgccaacgagtctactgctgagggtcaggcacagagcggatcctcatcctcatccacttcgacttcgactgcctctacctccacttccacctccacctccaatggtgctgctgtaccgatgcaaaccgccgcttggggatttattggtgctgctctcgttggtggtcttgctgtgctgtaaaagctgattatttggttgcttctactttattgtctttggtctcggagtttagcggtgcataataaacaatgatgtcttctctcacacgagacgatcctgttgcgctcacacgactaatcacatcgcagaatgtgacatgcacccttttgtcacttgctgatactctagccatgtttcgcgtagaagattggggtagtctgaatattgcgttctcatcgttctgctgtcttctttccgacaggatgagccttacaattaaccctatgttgcatctgctgacctctgctgcttcaagacgaaaccggcggccgataacgtgacagggaattcccagtcacctatgccgacagcgcagcgaaattgaatgtcaaattctacgttacatatagagagtacatcaaggacattgacaatttgagatcaatgatctctgcaatcgctataccctgacgaacaggtctacccagaagatggtaatcccacgtgtcgtcctagtaattattcgcaaagtatttggatgagcaaactcatagtctcggtaaaatccagtattcctcatcgcccttgcatggcagtggaaggcagatagtatgaagtgtcacgtgtgcgggtagattgacatatcaggcaactaggaaaatggatcatctcaagacatgagcatccaacaaacggagagagttgctagcatagtccagggcatagtccatgatggagaaccttgagatactgcgtccagttggtgagtagatcccgatccctgtcaaaagcagtcgggaaccttctccgaaagtcaacaatgcctgaccccagtaaggtcgattggaacaatattcaacgtcacgtcatcagcttatgttttacttaaacgttgctgtatcagcaaattatttcctaccagactcgttcgtgctacctgtcaaagactatgtctatcaggcatgcgaggccgcaatcgcggaacatccgtcgctatccgccattgtggcggacggagaaaaaagagannnnnnnnnnnnnnnnnnnnnnnnnnnnnnnnnnnnnnnnnnnnnnnnnnnnnnnnnnnnnnnnnnnnnnnnnnnnnnnnnnnnnnnnnnnnnnnnnnnnnnnnnnnnnnnnnnnnnnnnnnnnnnnnnnnnnnnnnnnnnnnnnnnnnnnnnnnnnnnnnnnnnnnnnnnnnnnnnnnnnnnnnnnnnnnnnnnnnnnnnnnnnnnnnnnnnnnnnnnnnnnnnnnnnnnnnnnnnnnnnnnnnnnnnnnnnnnnnnnnnnnnnnnnnnnnnnnnnnnnnnnnnnnnnnnnnnnnnnnnnnnnnnnnnnnnnnnnnnnnnnnnnnnnnnnnnnnnnnnnnnnnnnnnnnnnnnnnnnnnnnnnnnnnnnnnnnnncacccgtcgctacccgccattgtggcggacgaagacacacgagacccctatttcgtacggctgccagaaattgatcttgaccaagttgtgtctttccaggacagaaaaccaggcttgttaagtaccgaagctgatggcgagcctaccccggatcttgacctgcaaaccttgcttgcgaccgagcataacacgcctttcagggctccaaatcctttctggagagtctctgtccttctagatatagaagatgagcggcaatttactgtggcatttgtatatcaccacgccattggcgatggaacatccgggaaagccttccatcggaccttcctacgagccctaggcgtaacggagtcctcggaccagactatatccatcgtcaagtctccaaacctccctcttttgccaaatatcgaggaagtgcacccaatgtctttttccttactctatcttgcgaagaaaataatccaggaaaaagtatactcccgacgacccacaggtctatggactggctccaaggtcctactccccactcaaacccgcctgcggctcgtgccattctccagactccttgtcaaggcagtaagagacagatgtcgacaagagagtacgacaatcaccgcacttctgcagacgattgtcgctcgctctatcttcgcacacatcccgcctgagttcacgcggctcgcctgcaccggcgcgctctcgagccggcgctggctgccagattttatcactgatgaatcaatgggtgtctgggtccaagactacgaagagacctattcccgggcgacagtcgcaccgtctgaaggcttcccatgggcagaggctagacggtctcgtaagacgattcagtctgttctgaaaatgaaagggaaaaatgctagcacgagtctacttcagtttgtcgataattttcaggaggaattgtgtttgtccaaggttggcaaggaccgtgataagagcttcgaggtgtcgaatatcggcgttttggacccgcaaacaaatcctgacctgccttctatcaaggggatggttttttcccagtgtgccagtgtgatgggtaatgccattgaggtgtcggctgttactggtggggatgggtgtttggtgctagctgtctcttggcagcaaggggttgtggaagctgatctcatcaatgaaatcgtagaatcgaccaagcaggacctatattctcttgacgtggcgtgatcaatggggataattcttgcttgggtatagactttttaatgtttaatagtgcatccatagacttatcgggagcgctcttcggatgctgttatcaggtgggcggtgagagggcgataacatcggcggcagaatcatagggaatctacagtctgacctttcccaaccttcttgttaacatctcataacatataactatcaactttcaatatgactcgtggcccctacattgttccggcgctcaagaagcacactgccactgtcatcatggcccacgggctgggagataggtaagtgtatcgctggaagatagttaaacgctagtatcaagtctaacagtgttcgaatctagtggtgccggatggtatgaaaatgcccatcaatcgcctagcctaagccaatgatcgtcgcatctgaccatgattttctaatttctaataggatgtcccttgcccagacctggcgccgccgcggcaagttcgacgaggtgtccttcatcttccccaatgcgcccgacatcccgatcacagttgtatgtgaacctcatattcatcatcaattgaatatcaattgacgagatttcaattagaacttcggcaggcccatgcctgggtggtacgacatctcgaaacttggcggtgatgtgagccctccatgcccaaaattgtcgaataaactcatagtcctgaccattatctccttctatctagttggaattcgaagaattccttaaaagccaggatgaaccagggattatccgctcccgcgactacttcaatagcctcatcgagcaagagatggaaaagaatatcaaggcttcacgtatcatcctgggcgggttctcccagggaggtgcgatgtccgtgttcgccggtgtgaccagcaaggaaaagctcggtggtgttttcggtctatcatgctacatgctattgagcgaccggattaagaactacctgcccgaggggtggcccaacaagaagacgccgtttttccttgcccacggtctcgaggataacgttgtcccattcgcatctggcaagacttcggcagctaaactcaaggaactcggcctagagaatgtttccttcagccaatacgagtatgttttggtcgctgttgttctggattgtgatggtctgcttacttgatattcctacgttacagagatcttggtcactcggcgacccccgaagaaatcgatgatctagagaagttcattgagaaagccctcgccactgaaggagagggtagtgcttctgctggcttatgacttagtcatgatcagaacgagaacaccgaaattggtctttggagatataccttgatcatgggttttgtggtactgcttgctgctgtcatctggtctagatatcagttgtcaaagcagaaacaatctatacagacgcagcattaacaaaccgagcccagatccagctttgagatacataatagtgcaattcaataccggtcttgtaagtgtgagtgataaagtcgggcctcgcctgcttagcgtaggaacctcggaatatatatatctctatgtccatatgatgtatttcaccgacgcatttactccttatagctaggggatatttaccgccaggtggtattaaatgtacatttaaacttaagcttgctaatgccaatgtaatttatgatagcgtggtcaatctactacatgtgcgcagttatcctagcatctggtcggtcgaccatagacctagaagaaattctagatggtatgtggatatatgcagcgtgatgcagtagaagaggtttgcttttagattataatattgaaaaactcttcagaagtcggtagttgtacattgatataagcctcagatatcgaggctgcagatgcaagatgagggaagagtcgcaaacgtatcgtacagccaataaaatcatgacatacgcccagggatatccaagattgcagatagtgcagaaacttcgggcattcgaagcctcgagattggaaagaacaattgtgggaggagaaaatggaacactggcaggagaggtggaggaggttcggagatgtagatagatcaaattctctgtgcggacacagcatgatcacagatcaatagtcgaggcgcaatggtctagtcgggggattatttttcacccagcatctccttgcgcatctcctcccgttgtgtccgcgtttgttccttctcatgtgcgcgttgtgcgtctagagctgcttgcttcctatctaattcttcctgggcggcgtaccagactagaagaattggtcataaccattagccacggatgcactcccagggccgagcgaacccgataccgcagatataatcatctccagggtaaattgcgagtacaagacatactagacttatcggatttggaccactccttcagcttagtgacgtagtcatcgaattcctgcgcccggcggtctccctgttcggcgctgcgcttctgcagatccgggttgtatcgctttctaagctcttcgtcggagggtcggagatattcgacaagagcggggccaccgacgaccatgaggaggccactacggtgagaaccgaatgtgagcacaagtttttgtgacgatgcaggcgagtatcacttacccagctatggtcttcgcccataatccggcgcgagacattgtggtaaatccgaagcgcggatgctgattaccgatttgaggcttcggtatgacgatgtgtttctcggatgactcggggagatataactcgagatgctgagaccgatggatcattaacatcatcgcggctctcatttgctgttagaggcggcgtggcgcagccgatgtggcgcagtaatacgctttgcccgatcgagcgtgccacttgtatcaatttttgtcgcttgttccgtcattcttgaggaagtagtccgagacaggatgtggagtctgtcatacatatgtatacttacaaagtccatacttccgaggtagcgacatgttatacggagtacaagcttgggcagtcctcaggggtgctgtgctgcccgattggtctagggtttagtttaacttagtcatcatggtttgacctcgggacccctgagcagctgtaatccctacataactatggctaatatcacggagtacaagtacagttaccagggaagtacaactggatgccaacaagtcccgtcgggtttgaaattgagattgtgatgggcttgcaggacgacatagtgtgtaggatcccgggccccagcttcacccctgatcgtcaggcaccgagtggactgaattacatgtactccgtaactttcgagctttaccttcacatacaatgatgtactgtataacagctgtatactgcatcgaagcatcaaaggcagtgagaataataaaaggaatatgggtctatgacgatactgcagttctatattccccacttgcgttagtcctctaaacggccgcaaaggagattggatactataaaaagggaaagtataataaagcatgaagagcatgaaatgcatgaaaagcatggaaaatacgaaaaacaaaacaaaaagtgtctggcggttgtgggtcaagcgatttgtttaatttaaagggtcacctgcgaccgcccctaaatcattctgcccccgcttgctttactctttacttgaacttcactgaactcactttggagtgtggctcctgaccaccctcaggtgcttgatcagcttgcggcaggcgcgttggtcattcgacactgcggtttggctttgcgcgaggtacctaggtaaggatcagtgtggagtcccaagggttgccttctcaggatatccatggatcgtgaaatgaataagctaactccaaattgcagccctggacccctggagtttaccgaactgtcttctccttgcatgcgactgcccacaagatttgcacgatcgtgaacgatcctcgaagactactcgaatcaccgttgtatagtacgcttgtcggcctgcgccatgtcatacccccaacaacatcaagcgcagaggccgcctttgcgacaatacagcaatccccctccgcgttctgtgacatcgccaggaggatattcgcaagatggctcccacggaggatacagcgacggtggcatgagtagccatagctaccagcagactgaccccggctacgacgatgcggcatacagctaccagtccacctcctccggttcgcaatcatatgcttctatgaaatctcagccacgctcgatgcgaccgccgggaccaccaggtccgagaaatggacgaccgccaggccctggatacgatgatcggcggggctatcctcctggcggaagaccacccccgcaatcgcggtcaagaacacgtacgtaaattcagacagggaccccaaagccctactaaccgactataagctggcgcacgcccacccccaggcggtaccttcgataatcctttcccctcctttccaagtcgagacccaagagatccgaggccgcctacagacccacgagatcctagagcacctagagacccaagggatcggcgcggtccgccacgagggctagagaatgatatggctgcaatggacattaatggcaggggtcctcctagatcgcacactgtgaattccgatggaagacggccagatatgcgacagccacctccgcgcggaggtccgcnnnnnnnnnnnnnnnnnnnnnnnnnnnnnnnnnnnnnnnnnnnnnnnnnnnnnnnnnnnnnnnnnnnnnnnnnnnnnnnnnnnnnnnnnnnnnnnnnnnnnnnnnnnnnnnnnnnnnnnnnnnnnnnnnnnnnnnnnnnnnnnnnnnnnnnnnnnnnnnnnnnnnnnnnnnnnnnnnnnnnnnnnnnnnnnnnnnnnnnnnnnnnnnnnnnnnnnnnnnnnnnnnnnnnnnnnnnnnnnnnnnnnnnnnnnnnnnnnnnnnnnnnnnnnnnnnnnnnnnnnnnnnnnnnnnnnnnnnnnnnnnnnnnnnnnnnnnnnnnnnnnnnnnnnnnnnnnnnnnnnnnnnnnnnnnnnnnnnnnnnnnnnnnnnnnnnnnggtccgcgcggacctccaccagggcggggccgaggtggctatccaatgggtccagtgcgagctgctagttcaggcagaccaggtcgacctgatagagactatccagactccatgggcccgtctatgcatccgccgccaagaagcgcaacgatgccgctcgccccaggcgcaccactctactcaggcgcaccactctacccaggccagtcgacctaccaagaaacagattacccagcgagctccatgaaggaacctcttatgcgtcctgatactgctgggagcatgcgacccccacggtctcgtgcccccaacgatatagacccaggactgatgatccccgccactacattgatgatcccccccgagcccgccaatcgtgtttcatatgcgcccaaggactttctggacagctattatgagtctggtgctggtgctgccgatgaacccgatatgcctaatttcgatgccatgcccgaccctcgtcatgccccgattgatgagatgggtttggacataacacccgtcaagagaccggtccatggaccgacttcttcgctcgaagagtactcatatacccccaacgggtcggaggctatgaactcccaatctcaaccaaattttcaacaagcagacggtgccggtgccaatcagtttgaaaatgcgggatttcagtttggtattcctggagaagcttcccatgctcccgctttcgaccacccaggctctgctgggtatgtgtcgaacggttacgaagattacgccggttactcacatggctcttcccctgtccgatccaaccagccaggctattcccacgaccaggctgagatgtcagatcctcatcagaatcccgatactcttactcaccacccagcgccattccgccccggtcacgatcaaggatccaaacctgcgccggttcggcagtacatcactcctgaatctatcccagcccttgctgctccacagccaatgatgcctagtggaacggttcaggcgcctgtcacgattgaagagatacagcggctacaacaacaggcgcgagccaatccttctgatcagaagactcaacttctactcgtcaaaaagctagtcgaggcttcgacggttctggtggaggacaacagcagactggatccgaaaaccaaagccaaggccaaagagaagtacgtgatggatgcacataagatcctcaaaaagcttgttacagccgggtattctgaagcccagtttttcctggctgactgccacggtgagggtctaatggggctggaagtcgaccccaaagaagctttctcactatatcactctgctgcgaagcaaggccacgcacagtctgcatatcgcgtggctgtatgctgcgagatcggacaggaagaaggtggcggcaccaaacgtgatccattcaaggccgttcaatggtacaagcgcgccgctgcgcttggtgatacaccagccatgtacaaaatgggaatgattaatctaaagggactgctgggtcaagctcggaatccccgggagggtgtatcgtggcttaagcgggccgctgaccgtgcggacgaggaaaacccgcacgctctccacgagcttgccctcatgtatcagaacgctggcgggaatgatatcatcgtccgcgacgagcagtatgcctcccagctattccatcaagctgccgagctgggctacaagttctctcaattcaagcttggtactgcttatgagtacggtctgatgggatgccctattgacaaccgcacgagtatcatctggtacactcgtgccgcggcccagggtgaacatcagagcgaactcgcccttagtggttggtatcttaccggatcggagggtattctatcgcaaaatgataccgaggcttatctgtgggcccgaaaggccgccaccgcaggtcttgccaaggcagaatatgctatgggatatttcaccgaggtcggaatcggcgctgctgctaatctagatgacgcaaagagatggtactggcgcgcagctggtgagttgacctccctttgactgtttttcgctctagccaactaacctttttttcagcccaaggataccccaaggcccgtgagcgtcttgaagaccttaagaagggcggaagccgaatgcaaaagactcgtctctcacgctcagccgttaacaagcagagtgatggggactgcgttctcatgtaattggatatcttcgtccttcatgatttgccacgcttgaaatatggcttgcatgtatgcatctctcttcatgatcaccggcgcttgatgtattctaccccggtccagaacgcttctcttctaccccatggactgctggattactttattttcttacttgctcatatcctttttttttccaatgttcttccttgtttcgaattgctcttcttttctttaccttctttggtcccccattttattcttatttttattttttacgaatgggatgtgcatgactggaatggacacggtgaaaccaatatcaactggctgtagcatttgtatacattaatagattgttgaacgaattttctttttaacgtacgatgtatacatatacgaagaagtcccaattccccttgagatacccgtaaatccgagccaaagctgcagagcggatatatgggtcgtcaacgggtgaattccgcactgactggatttaatttccaatgcttggccttatgatcgggctctctgcgcttccaaaagcatctaattaatcagctctagttccctggaataagttgtctttctttttgtctgaacatttcaatataaatagaagctgtttggtgatttctacaaggtagtacattgccagctccatccgaaacaagccatatatgtcttccgaaagccgacataacgactcggaaacacgaacaccccattcattcagcggacacaaaatcgctcttgtcactcttttgaccgttctcacggctgtacttattgctctattctgggaagacaccgccaatctgttcggcttccgacgcctccttggatcctgcgcgcgctcagcggcagtacctctatctgcttcaacttccattgcagcagctgcgacagtgaagggaaactcagacgtaaaatccagcatgaaaacacctatttacttcctcagccatggcggggtaagttatctatatcctggttcttatcatggactaaaagctgatttaatacccacagccaaacgtcatgtatgagaccgatcacccggcttaccgtaagctcggggagattgggcgcgagataacaaccaaggtgaagccgaaggctgtcgtggtattctcggcgcattggcaggccggtcgaaatacgatccaggtgaataccgccgagaagactgatttgatctatgagtatgtttgatatcgaaatcatggaaattccgaactaactggatttagcttctatggcttcccaggtcattactataaagagaagtacccaaatgtgggtagcaaggaattagcaaatgaagtcctgagattgttgaaagaagccgatatcccggccgagggcgttgagcgcggactcgaccacggcatctgggctagcttcaagtgcggtatgtgacaatttgcatcaaaacggaaactagacgctgacgaggacactgcagccttcgagccagaaacaaacccactgaacgttcccatcgtgcaagtctcgctcttcaacacagaagacccagaccagcactaccgactcggacaggcagtcgcgagtcttcgcgagcagaatatcctgatcatcgtgtccgggatggccgtgcataacctgcgcgatatgcggtttgcctttggcagttcgaccccgatgccgtatgcggttagcttcgacgaggcgcttaaggatgccgtgacgactgcgcctgctgaacggcagaaggccatggctgagctattaaagagaccagacgcacgccaggctcatccttccttcgagcatttgctgcctattcatattggagctggtgctgcggccgaggacctggggaagaggatctggacgttccccgaggggagtatgagctgggcgcagtatcggtttggtgaggttggcaatgttagtagcgcgttgtaagagatatcatcgaatcatcaccggaagtaattaaattggatttgttttggatatgagcttcgatttcatctataggtacagaagatgggcgtaggacggtgggaacgcggggggcataaaatagatctgcagagaaacaaaaacaagttatagctcctgcttcaccaattgtgtaatgcgctcttcgatctgcgcgtccgacaggcctagaaacatcaattagcattgcaacctgatgcaaaattatggttggcgggggatatttaccggacaacccttcttgcttctccttgccgaaagctattgagagggggggccatgttagcttgattcgcttatccaaagagctcacacaatgggcttagaggtgttctgccataccatatcgggcatagactcgcggctgggtgccagcggcctcccggatcatgatgggagtctgggggttgtgcttcttcatagtcgggtaggcgcggttcaagaaagacctataggcacaaaagaaggtcaatcagtgggctggaactccaatcggctatggataggggtgtacgcaccttgtggccgcgctcgcttcggaggtctggcagaagaggaagcggagctccttgaggccttgagtgaaaacgtacttgccagtcatagtggcaggatggtcaagcagacgtaagtattaggcaaatagaggtctcggatgagccacgggggaatggacgtgggagtagtgggattgatttgctggacagtctgcgatgcagttcattattcacgacggcgttgattcgttgcgcagccataatcccgctagtcccgatatcaactagcgcaccatgcttactcagcttcaacatctaccgaggcctcatatctagcgacagcgcaggagtgatgataagtaggggataattaatcggagtagatgatagggattacttgagagtactccttttatcttctatagactatatttttatctacctgcgggtgtggtgctttagtgcgctatctaccgctcccaacagaaacaccgccgccgccttcaccgacgaccttcccgaggttcatccctcttctttctcctcagaaccaccatctcagctatcaacatgtcttctcgcgttggtttccgctttgtaaacaacgctcgtttcgcgttccgcaatgcatctgcgccattccgtcggccaggtgctcagggcttccgctggcagagctccgaagccggtgctgctgagcatcagaacgccttccagcgtctatggaacagccctgttggtatgaagactgtccacttctggtaagaattcgaatcatgctgcattgcttgtctcttttgctactacgaattgatgctaacttcctgtttcacagggccccggttatgaaggtatgataactcgatttcctggtctgacacaccatctataccccgagctacccttccggatacaacgtctctatcagacttcaccgtatattgcgaggattctctccgcgcctgctgagtacgatgcctaacatattcttctctaacagtggtgcctggtcatcgcgggtatctccgacttcgctcgtcccgccgagaagctctctctcacccagaacgctgctctgatgggcactggtgccatctggactcgctggtgtatgatcatcaagccccgtaacgtcctgtatgtggaacccgatagcagacccgccggccatcaatgctaacacgacataacttcataggctcgccgctgtgaacttcttccttggatgcgtgggtgccgtccaagtgactcgtattttcttgtggcagcgcagccagtctcactcatccctcgaagccgccaaggtgattgagcatgaagctgttgactccgtcaaggctaccgccgaggcggctgagggtgccatcgagtcggctgagggtgccgtgaagaaggctattaagaagtcgacttagataggaaaagaattctgtgaggacggcggggggacttggaagagtgttcctgaatacatctcaaccggtatctatagccacattttacctgcgccgaggtgatccttcaggaatcttgaggtcaagcgagcttgcttgcttgggtcgaccgctggctcgtgtcctcgagaattcagtcctctaattaaacagcgttgtacatataaaccatgtttcgaaatgtttggttactgttccttctgcgagacatggtcaagaattccgaagaaatttactagcattcgtcttgtaatcccaactatcttctgtttggtagttactattcagaaaaccatggtgctgacggtatctcgctccattgcttcgaaatatattggatctagggactttacccaatttatccgggattttcctcccaaccggagaaacagcgccaaatattcctcctatcaaacttgcttggggctatgcttacgcaatgcgaatcaatttatctcctgtctgatctttgacgagacggaaactcactatacaagccattaccataccccggtttctccgcacattgcggagtagcttgtttccccggaataaattgaaggggatgtggttaccccatcgcatgaccgcaaagggggatgcctagctttgacccagttgagctagattggggtaatcgaggaaataaattgttaatgcggagaatatataagctgttctggaggtgctcgagccgagaggattgtcaatctaactcaaagaatcctctatatcctcttgacaccgacgatgaagatttcaagtactttcaaccaggccttgggattttgtttgctaattagtgccgcagttcaggccaagggatactctcgaagcgaggcgtgccacccgcaccatccattcaagccccttccgggcagccaggccagaactcgcacctgtcatgtaatcaatcatggccatggacgcgacgattcagccaatgttcttaccgcattgaagaaatgcaacaacgggggaaaggttgtctttgatgctgacaagacatacacgattggaaaggcacttgacatgactttcttgaagcatgtggatctcggtatgtaatacgcgttggcgtccaatatgagacgcgtgagtacttacgcaagctgccatagaaatccaaggccatatccaatttagcaatgacacggattattggcaagccaacgcattcaagcaagtctaccaaaacgccaccacgttcttccagctcggtggtgaggatgtcaatgtttacggtgagggtactctggatggtaacggccaggtctggtatgacttatatgcagaggatgccctcatcttgcggccgattctggtaggtataattgggctaaatggaggtaccattggacctctcaaccttcgttattcgcctcagtggtatcactttgtggcaaactcatccaacgtcctttttgacggaattgatatcactgggttcagcagcagtgcgaatgtggctaagaacaccgacggatggtaagtcatctgatcaaaagaggaactagcttcatgtaactaataccttacatagggacctctatcggtcaacgaatattgttatccagaactccgtgattaacaacggagatggtaagtttcttttggaaaattgaagccggtcttcttttactaacagtatccaagattgcgtctcattcaagcccaatgttaccgacattctggtccaaaatcttcattgcaacggctcccacggtatctctgttggctccctaggccaatacccgggcgagattgatattgtgcagaatgtgctcgtctacaatatctccatgttcaacgcatcggtaggtttagtactggagtgacataattgcgtctctaacaatcatgaaggatggtgcgcgtatcaaagtctggcctgggactccctctgcgctctctaccgatctccagggcggcggcggatcgggcctggtgaagaacattacctacgacagcatgaccattgacaatgtcgactatgccatcgaagtgacccaatgctacggccagaagaatttgacactctgcaacgagttccccgtacgtgtccatcaatcttctttgtccctcttttcttcattccgaattgatatcgtcgctatggtttgtttctggtcgccgaaggctaacacatacatcacacagagcaagcttgttattgaagatgttttcttcaagaattttaatggtgtcacctctgggaaatatgacccttatgtgggcacgattgtctgctcaagtcccgatgtaagtgcctgagcaccaccggctacaactccccatctgacttgtacaggtttgctcaaatatcaacgccagtggcattgacgttgttagccccgatgggaatgatcagtttacttgcacaaacgtgggttcatgttgaatattggtgcaacgctgaaaacagatttactgacttattcctctggctgtttaggtcgatgacaatttgctggatttgaactgtgcttcctctagctagtgatgagaagtgttggtacatactgcatgatagaatggatcttgtgagtgtttccggggtttaaatctactcacatcctgtacaaagtacagagtagctacttcatggaaaacgttcacttcttcccgagaccggatttgatgccggtttacaatagccgagcctgcctactccatacccgctccatacataggcagagatagatggtactgtttcccaatcataccctcacattggaatttgctatcaatccagaactacagccagccacatagtctatagaccccactattattacatcccgtgtgcgcctggcgatgcatatgtatgcacacaatctactctggtttccactcgattacgtcgatattctttttaaatatctcccttgcttctttttttttctatgtgggcttttctacaccgcattgctggaactgaactctgtattgttcgggattcctgcgctgagccactgcagacatgtatttaacctaatgacactcccaaacaatattttcataccccatttagaacttctttgcaaatccgagtgacagcagaagaaatttctcatatttgaaatccaatacctttcctctcggccttccttacatcaagatctatcatgcatccggattcccaactcgagaccgccgtcaaaaacggctttgacccaaagagtctctacagtacagagttgacgaaggtcaatgagccagcgagaacgattctcgagcaatacagcaagattccagcggagaaggttttgcaacatgtgaaagatttggtttgtggctcaaccccacacgtgaacgataacatttattgacactcagtagaaagatcgtgcctttgaagttgtgagatctcctctaagtccatcttttctgaggtcaaagggttgttggctgatttgcatacgtgttagttcccttatgcctgtattggacaagcctcattccttgagctgagcatcgcatcgtccccatgttatcctgagatgcttgaccgtgtcaagaagggagacagactacttgacttgggatgtgcatttggacaggaactgcgacaattggtaagttgtgtcgagcaaatgaataacatccgacgattgcatctttcccaccttaaccagagccggctaatcagaataattccggaaattcagatctatgacggcgccccatcgcaaaatctgtatggaacggaccttcgtcctgagttccttgagcttggccttgacttgttcctggatcgctcatttatcaagtcccatttcatcgatgccgatgtcctcgatgataaatctgctctcgttactcagctgacaggcgagctcaacattgtctatatctcccttttccttcatgtctttgactttgaaacacaaatcaaggtagccaagagggtacttgatttgcttgccccgaaggccggttcactcatcgtgtgtcgggttgtggcctgtcgggaccaagcgatagggaacgccaccaacgcgcgcctgccatattattaccatgacttggctagttggaaccggctgtgggagcgtgtgcaggaagagacgggactaaagctaaaagtcgacaactgggaacaggatgatgctttggcaaagaagcaccctctagagggcatctatatgctgggttcatcgattcgccgggagtagggctgctcgtctgtagtacatcacaatgaaacatttgcaagtggctgtattgtatacgtcgtaatttgaattgacgatcacggcagggatggcgaactgaacgctggcaacgagacaacctgattctgatttaagcaggactaactaaagacaagtatgtgactatgcatcatatttgttcattgtcattttatttgaacaacaggtaatacgccgccttcactagttacctgtacatgcatgcatacgtacggatagatgtatttatgtatcgaagttccactattttaaataccaagtacgtacgatacaatcaaaaaagacgagtttatatgtattatccatgtaacggtatgataaggatagtgacaacataaagcctgaacttcgaaggttcttcttctctctcctgatatgttatatctttacccaagagtgatgcaatcatgggattcttttctagcacacaaccacctcgacctgccaccgtgccgagcgatgagatcatccctctccatttctggaatactgctttatgtatgcgcggcacggttttggatatctcgctgaaatttgatgatgtgttggatacatcaaaactgcgcagtgcgctcgaggaactgctcgagatgaaagattggagacagctgggtgctcgattgcgtatgaacgtgggtggtttgagaccggcctccgatttacacgcttaatgctgacccggaacgacctgatagccaaatggaagacttgaatatcatattccaacgcgtttcgacgcctcgcggccggctttcgccatgaccaatgctcagcacgagacaagcattgccgaccacccccttggcgccagaataccacatgcaaccagcacgcctgccatctttccatcacctgatgtgttaagccctttattacgcagcgaagacgcacccaaaaatattgatgactggatctgttcagaccggccccaactatctatacatatcatcaccttcagtgacgccacactaattactgtcacatggctacacacactgacggatgttatgggaatggcattaattttgaatgcgtggactgctctacttcgagggaacagagaggcggttcccaagctacaaggtttccgactagacccgctcacagaactcggccagcgcaccccagcggaaaaatacatgcatttcaaccgtgtgtttggccgcaaagagttctggtggtttatcggattgaatgttcttgacagactgtggtaccgccaggaggagcggcgtaccatttgtattcccgccgccagtttgcggaacctctgccagcaatcatccagtgagatctgcgcttcacgcgggaaagaagagccagtgccctttgtgagtgaaagcgatgtgctgttgggatggtgggtgcggagtctttacagcgcgctggggctcaggacggaccaaactatcctagtgaacaatgcgctaaacctgcggacatctttgcatgaatcctttacgtccaacaatagtgcatacatgggaaatgcactgtgcatgtcgccgacctttctacgcggccatcaggttgccgacgagccgttaggccaaattgctctccggattcgagaatctgtaacggaacagcgaaccccagagcaggtcgaggcgatgacagcacttcaaatgcagacgatggaacagacaggctatctggccttggtcggcgatcctcggatgatgctgctatcttgctccaactggcacaaggcccgtctctttgacatagacttctcgtcggccgtgttacaaagctcgggtccgtcgagcctgcagaaccctcaacatacaggaaagccatgctatgtgaatggagttcagcactccgcaaattcatttcgcaacgttctttcagttataggaaaggatgctggcgggaattggtggttaaccggtgttctacgaaccgatgcatggacgcatatcgaaaaacaattgcacaaattggggtcgagctaggttgtattcaaagtatcacaattaatgagctatattcatgtgatgtttttttatatcggtgtacggtgacttgaatttaatctcttggatttgtatttccaaggttgcgatacttgcctttcctgtaagagtaatgtattggttaagcacattatcccgatataaaatacagagcgtgagatatgttctatacggagtacataaatacacatacaactaaaatactcgaaaaccgaaacgaaattgttttagcgtgagatcccgtctcgggccgcacgggacggactagacccataatcaaatacggctatacggtatgttatgtgtgtgtgcatacctgaaatgtgatacagctatttacatagcaggtgcagtgacgatccattgatatgtaaaatagtacgtttaaagtccgtatcaactctaattacatgacgacttagtagacttgtagatcggatcagtccttgcattagcatgcgttggcatcggatatcaccgaaagtagaaccatatcctgcacctgaagacacactcgttctcattttcgaaattctgttgacaaaactgctcatctgagatcctctacacaaagcaccaacaatggaggaatcgagcctgctctcagcaatattggatcatagagatgccttggcatctgtcgcagaatttctccgaattctggctggaatttgctggactttaaactacttcagcatgttgcgcacgtcgcgaaaagacaagattcccagcacaggtatctttcctctctgcaatgacattgggtgggaattcatatatgcctttatctacccaaccgcgagcgctcattgggaaggaggagtccgagtctggtttttggttcattgcatcgtcatcatcttcatcatcaaatatgcgcacaatgagtgggaccactttcccctcattcaacggaacctttacttcctatatggagtagtgactattggcttcgccatcggccaatattcgtttgcgcgagaggttgggcctgacttgggatttttctacgggggtgtgctgtgtcaaacgctggcaagcctggggccaattgctcagattctttctcggaatagtacccgcggtgcttccctattgacttggtaagttcaaagctagatcagctgtttgcattcgtcattgacatgataaaaggctattgagagcgattgctacttttggtggattcattaagttgactatctattacctcactggaaatgctgcaggaccttggtttgaaagcccaatgtgcaagttctatatcgggttgaccttggttcttgatttcacctatccgatctgttactatgtcattcagcgtcaggagttggccaatgctcagaaggagaaaaaggagaagagcaaataggaaaagccatcatgaagcatgatagctggatgacaagttgttctgtgaggagtacggtataatgctaggtggttcggcaaggatgaaagttgggttgcgttcaaaagtcttacatctccggtctatgtatttagcatgaaatcacatatttacgaagctcaagaagtgtcacaatacatcaataaaatcctataaaaaaaaacaagtatctgcaaggagcgaggattgcgcgcattggaacattttatagataaaaaagggacgaacccaaaaaggaaaaaggaaataggaaaaccgcacatagcaaggcatattgatcatcaagggggaaagccaacaataacttgcattgtacctatcaagtgaagcggtacacgtccctgtttcgtaacttcatttatctccgacattcttcaccgccaacaacatcattatatgtagcactagaaagatttgtctttttctaaatgcagacatggaggaaggcatggaagctcccaagttcaaagtcatcattgttggggggtctatcgctgggttgacattagcccattctttgtcccaagccaatatcgaccacgtcgttctcgaaaagagagctagcattgctccccaggaaggtgcctttattggagtctggcctaatggagcacagatactcgatcaacttggtctctaccacagtctggaaaagctcactgcaccactaagtcgcatgcatctttccttccccgacggatactcatttagcagtctcctgccaaagacaattcatgaaatgttgcttcccaatgtctctgaaacccagatatcaaacaaattctgactactcaaacgtagatttaagtaccccatcgtctcactcgaccggcaaaaggttcttgaaatattatttcagaactatccaaacaaggaaaaaatcattaccaaccagagagtatccgaagtgcggttattgggcgacagtgccagtgtggtaacagaggatggaagtgtattccaaggagacctgattgtcggcgcggatggtgtccacagccgtatacgctctgaaatgtggcgactggcagatgaactacacccaggaatgatcacaccccaagaaaggcaaagtaggcaacatcgtcctcttcggaaattgattactttggagacttcaactgactcctgaatttcttcccgttagctcttacggttgaatacgcatgtgtgttcggaatatcacgagcaatacccggactccgaagcggagagcatataaaccattacggcgacaaattctgtgtgattaccttccacggaaaggatggtcgtgtgttttggttcattatccaaaaattggaccgcgtttacacctatcctaacgctcctcggtattctcctaatgatgcagcggagctgtgtgacaagattcaagacgtgatcatatggcgggatatcaccgtaggggacctctggaagaccaagctggtatcgtcaatgacggcactcgaggaggggctttttgaaacgtggagcttgaatcgaatagtcatccttggggatagcgtacacaaggtgagatctgccagctatcctggatgaactggatttccaatgatctaacaatgtttcctcttcgccagatgacacccaatatcggacaaggcgcaaacacagctattgaagatgttgccgtccttgcatctctgataaatcgggtagttcacgcagatgccttgcacaaaccatcagaaagctgcatcgagacaatgctccaaaaatacaagactctccgatacgaacgtgcgaaaagcacatacgaacgctcgagatttggcgctcgattccatactcgagacaactggcttaaggctctggtgggccgatatgtgttccaatacgttggtggcctcatagagaaccggacatccaagactctggcaggggggaacgttattgattttcttccgcggccgcacaggcttgagactgggtgtgtgacacgtcttcccaaaggccaaggaaggcctcagcagcagtggacgctactctgggtttcctctctggtcttattcttgtttttaccttggcttagatcatatctgccttcggccaccttctggtgaatacttctcagcagaaaacatttttgcagatctttgtgaaggaacttgtgtatttgtgtttcatatgtgacagtgtcagtacaaagataattcaagtatcgggtgtcgatcatcaacccgatgagattattcgctttcgaattattctaaaaatactagtgggcctgactagtatcattatcataaattgatcgacgaaggcaaaggcgcaaggcaggctagctgaacaccacataattacacaagggggtgtgcatataaatctagttttataaatatagtatggaataatcgagctaatgcagtagatccatgcatctgtaaccagccaacaaaagctcgctcaaatggaataagaattagctggccatgcaatcagtggagccaaagagggcccaaggaatgatctcgatggcgaaagggatgctcttgttgttagacttttacagatgtgtccttgaatactttccacttcgatttgacttatctgatacctgaagtgacctttaccgatataattcataaacttctttctctactgtcccctttatcatttaatatttggctgtcgatacgccttcactacatatctacaccattgttgcctctgcatttcgcccatttcgcacagtggttcagtattcgctgaagtcctcatccccgaattccattttcatatgccacgatgacacgagggaatgaaaaagaagaagccccaccacaggccaaaatccttggctcgtttcccactggaatagcaccctatgccgagttgatgcgtgttcatcgactgttgggcttttacctgaatacatccccttatcttgtgggtgttgccttttgcgcatccatctcacccacaaagataccaatcactgttctcttgcaccgcaccatacttctatccatctggtctattttccttcgaagtgctgggtgtgtttgggatgatcttatcgatatggacttggatagccagatatctcgaaccagaacccgaccactgccacgaggcgcagtatccccgaagaacgctttccttctcactgtgactctcttcgcctgtgggggcagtgttttgatatatcttccatggccctgcgccgtggattgccttataatcacattttttgcattattgtaccccttcggcaagcgattcaccgactatccccagatcactttggtgaacatcggatgggccattccgatggcaatgcacagtctcggattagatcctctatcccagatgaaaccaactgtgtgcatgttcctgtttattggattggtcatcatcatgattgatgtaatttattcgcgccaggatacggaggaggacttgaaggtcggcgtgaagagcatggcggtccgtttcagggagtccatcgagctcctgtcatattctctcctttatgcatccaccggattcctcgcgatggcaggattcttcactggacttggcctgtcatttttcgtggtgtctgtcggcggtcatttctgcgggttctgggttctccttaaagcgactcgggtagggaactcgtatggagttgaatcctacgccaagtccgctttcttccttgctactttgttttggttgtttggatttgtgattgaatattgcctgcgtaactagatgactttgatggttctctacttgcgaaggtaacggggagacgacagtttatccaacgtgtgtgccattgttcacctaactggtggcccaccccaagtcacgtgactgatggcctatcttatctccaccggttgggtcaacttctgtaatttggttttaagcctcaccaatacctcaccaataccaactttccaccagtcatttctcgtcaacacctctcattaaccatccagtggaatcaggaagggataacaccttaatgaaacgctaatagtatattattctatgcatccatagaatatgtagtacagtatatctgtctaataacgccttaaaaagatctaaatgtaattaagcctccggtatttatgatgcgtattctcaagaccattaagtaatcactgataagcaaccttggaagttcaaccaaccggtggagatttcacgtgactcaggtgggttaggtgaacaatggcacacagattggatcaagaactcgagacttaatacctgactagcgctatacactttcgcagtcttcatatatatcgagaagtaaattttcaattgaattttattaagatttcaagcccaacgtttggttcattcagctttcctcccgttaccgaatccaaaattcaaaacgaatctccagttagatcacagaccaggcgttgtcgatgggaatgattgccccgttaattctcttgctctgactagagatcaggaatagaagacagtcggcaatatcctcagcctcaacccccagtcctttctgcctatcagcagcatgtgcctggtgaattagagacattgttcctagtgcatccttgtcccaagtgcttgggtcagaggcctgtactataccggttggaactcctagtgtaaatcataagcttctaacacaaatttgatcttaatagcatatgttggtccacgtacccccgggacaaacggcattgcagcgaattccctcttgtttgtacctccatgcaacatttttggttgcgcccatcagcccatgtttacctggaaagtaggtctgtcactatgctgatgcatacctcgattcatatggatatactcactagctgtgtaagcaacgccggacgaagcaccactcgtagctgccttgctgccgacgttgacaatactaccactctgttgctgtcgcataataggaataacctcacgcatgagcttcactggagctgtcaaattgactgcaatgcatcgttcccacatataatctgagagactatcaacgctggaattctggtccatgataccagcaatgttgagcagaccatcgattcgtccaccaaactctttgatacaggtctctaccacctgccttggtgtcgtctcatgggtgagatcaccttgcatgaatttgtaatttggatgttcattgagtgagacaggtgctgatgagacatcaacacctagaattctcgccccttggcttagagctgctgtggctgttgccagtccaattccagaggcgctaccggtgattatcacaacctagaacgcaattagtaagaaatttggacgatgagagatgttagcagctggggcattacaatgtcttgaagcagcgacataactttggtataatgagcaacagaagaaaaagagaaatgacagtccaattcgattgggaggtaaaagtagaccctggaaacagtctttgagtgcagtctctaggtttacacccactaacctttgcagtaccttatccaggccgtgtcttcaaattatttcttggccccgcatatgacagagaaatctatgatcatcacgtgtatcctgaacatcattcacagactgactagaaatgtgactatacgaggcaaggggaccagatgcaacacgcctctataactctatgttatggtgcttatcttgcatgcaataaagccaccttctgcaacatgcggagcagtggagctctttgtgtcgatctcaagatcaacaaggaaaaagcaatacacattgtgacacaccaaaagaacaaagttactcagctcagccacatgatttaaggactgcgcgttaatgcacgttggactgcagagctccaaaaattagctcagttgatagatcgtgttttggcctcggcccctgtgggaggtattctgggccctaattactagtcgtaataatacggcaaagaccgcattgtatatttggtcaactatctatctgaccgctgttttcgatcgtgggagtctttgtggcacagttgaaggtggcatgagcaatttactacgagtttcaagcaaatcccagtatccgagaaagcttcttgaacaacagaatgacgcaggctcagaactatgtcattccaccaggctctaaagtcctcgttactggagcgaatggctacattgcctcgcacatcgtcaaggctctattagatcttggttatctggttcgaggcacggtacgcacgcctatgccatggctggcggagtatttcgagagacagtgcggtttaggacgtttcgaactcattgttgtttcggactttcagcagcccgatgcttttgatgagagcgtgaagggtgtatcgggagtcattcatgttgtatgtttctttggtactagtggttctgacaacaatatgtgttaaccaaatagatgtctaggctcaaggcttaccttctagcactgctgcagaaaccgtgaaaagcgcaacagcttatactgtgaatggagtcatcaatcttttcaaggctgcatctacacaacgcacaattcagcgagttgtcctcacttcttctatcgtagcggcaggctaccctaccggaaaagggttcaagttagatgctggtaaggcaactgtcaatagataacaaacctaggctgacagaatctatatagattcatgggatgaaagcctcgaacaggcatctaaagatggaaccactgtacccatctatcgagcatgtaagatcgaaggagagagacaagcgtggaaatgggttgagaagaaccaaccacactttgagctcaattccgttcttccatggcttacagtgagtcttatcgagaatcatatgtttatatacgacgtcaaaagttgaactaaccacggattctttcgaagttgggcaaaattcttcatccgaacatcggtggttcaaccatgggatatgtctctggactactcagaggagataccacgccattcaaattccttccactgcgttagtattccaaatcaaattgacagacctattattgactaaagtactttgctagcttggtttgtggatgtggaagacactgctcgtctccacgccatagctctgctcaatcctagcgtgcgctccgagcgactcttcgctactgcagctccattcacatggggggatgtcattgaaattctcaaaagaatccaacccaataatgctcgtattccagctgctcctatacaagaggaaccgacgctcggagatgtcgtcccagcagcaagagccgagaaattgcttcgtgagacttttggacagcttggctggaccccactggaagtcagcctagagagcggtatcgcaagagagtaaccgatgaggtccggtggttgaagatgatatggtcggactaatcgagtacaatggtagattattgtgatgttgtgacagttcatatctcgattgaaattcaaaacgaagggttactagatcaaaaataccatgcccattaggggatctttccctctgacttcaagacttgcgttaaaagatcggggagggctacagcgatccccggctactgtagatcgacccctctctgcctgaaatttcagtttcaccttcctaattgggcacattttctgcctcgacacctgcccacaccgccttctggccttgactccccatataatagtagcaagacagcagatacctacaagttatatgtaaaccaatagcaaaatttcatcagccgctttaccgtcaagggatgaaatcctatagtaatcaggtagaatatacgaatttttctgatcaaaatacatgttttttactatgtaaaccagaatgcatgtagtggtggcagaatatatgggggacgccgctgtggtcaaaatatataccataagtgatacctgtatgaacatgatcataggaagaggactgatactaaagctagattgatacagaaagacattgtaagagcatccgaaaggttcattcttatattaatgtgatgattatcaccaggtagaattaagatacaattaaacatcgagagtgccgatcgactaatatcgaacatgatcacgcaaaaactcataaccatcttcaacagcccgagaagctgcctggtctttttcaaaaccaggataaatgtcaaacaggtgtactgccttatccacaactcggagttgtacctcaacgcccttcgtaaccagctcctgtgatgtcctttgggcctgttccactggaatgagatcatcaagggttccgtgtatgatgaaagtgggcgtcttgtaatgcccattgcgaatctgtgccagagggctcactgcttggatttcctcaagtgtcggaacgggcaactcctctccacagtcgccatctttatgatccgaccagaagcggccgccgtgaagcaacataggcaggctttgtcctttccagttcatgtgcaacgcaattcggctgcgaggatccgccggtgacatccagcctccaagggccttttggtcgaccggaggattgtaggcagtgattggcgtctcatatatgccttcccacaggtcgtatcgcatttctggcgaggcggcattctttccgtaagggaaattgggctgggaccaaaaagagtcttcatagtctgttgggccgtagaatgcgaggatagcgttaggcggggctatgcccctctgctgagaagtccaagccaatgtcatggccagatgggcaccagtagaccagccaaccgctaccgcttgagttccgtctggttggatatcaggacgaccaagagttaaactgggcaggacatggcgagcccaacaaagagcatcgcatacatcatgcattgggccttcggtcagggaaacctctgggcagagtcggtaatcaacactgactggcaagaatcccgcattcaagagcattctgacttgcttgctgcggatgtcccggcgcgagagcataatatgcccgccgccatggataagaagagctgtttgtcgagtgtaagaaggagggttgtcacggttcgaggaaagaggactgggaacaagttcgtctacataccaattggacggggttttccaataggctgaagatcccgaggatagtaaatgtctgcagagagctccacgccatcgttcttgccgtacacaatagtctcttcgttcatgagatataaggggctcctgggggacgggggtaaaatgacagccgaggttggtgacgcagtgatcacccgaagcacattggattcttgggagtcattgtatgtccagtccacccattggaaacccgattgggaaagagtttgtttccacacgtgttcggtcgcaagggcgtgttgccgaccatcctcaaagagccaccagccctccagcagaccgaagacaagatcaaaccagaataagttgcgtgtgagctcgattaggcaaagaagcccgtctggccgtagaagcttgttgatattggaacacgattgaacgagactgcgggttgcgtgcacacagttgctggataggacgatatcatattgaccgagcatgtctggggtaggagcccgttcaatgttgaggacttggtatttcatgaagctgtaatgcttgaacttcttgcgtgccagagccaggagccccgaggataggtccgtgaatgtgtattggaaacgaagaccaggaacggcagtcagctgacttaacaaagctttggttgtgcccccagtgccacctccaatctcgagaatcttaatttctctggtggtatccacgcggccaaggaggttgacaagatattgggctaggtggttagttgcagccttgaacattggagcgttcgtgtatacatcctccatcagtcgacgagcctctgcatcttgaaagagaagagaaagtgggtcggcggctccgcttaagcagtcactgagtcgcgagcccgttgtcctcagcagattgtgttcagatgtatgctggggatagaggcgaataatttcctcgtgcaatacatcggacgaaatggtggatacgggaaccgaagttcgcacaaagccatggtcagtagcccggatgagattggaaaactgcaagatggaataaagctggcttcgaaccttgctatgctgttgaagaaccggcacctgtgggataagatgctcagcctcaaagctctccagggagacaccgagggatttgaaagcctctaccacataagctgtgacaagggccatctgtctgggatatacggattcacaaaacccgtcccattgggtagattgactgtgcaccatacttctctgaatatcagtgaaaaggcccggtgcaatgtcaatgaggccatgtatttcttcatcggaaattggggttgggataacatgggtattgctctccgagtcaactgcttctgtagtctcgatttgcaatgacgggtgaactccatttgtgagaggagcagttgcggcatcggggaaaattgtctgcaccagcgttaggatatcggggatctcaacgaaggaggaagtgtcaatggtgaaattgaatctcttctttatctccaccaaaacctcagttcgcatcaacgaatcaacaccaatgtcttcgagattcgatgatggcaacaactcatcggaggcaattcctaatagatcacagagcatctcctggacgaccataaagtgtccactatccggggcagagtggagaggagccggaacagcggctagtgcattctgaggggtaggattgagtgcaaccttggagtcatcgcgaagagactggcctagaggcacttttttgtcgtcgggttgattgttcaatttcttgagtacccgggaaagaccggcgatggagacactggtaaatgttgccgaaagaatggtgacagcaagtttatcggtctcccgatctaggacaaacgtatcacaagtgatcttattcttgatagatcggtccacgttagagtatacagcccacgaacgcgagcaattgggatcccgggtcatgaaagcctctccaatcaatatttccccaaccccagtgcaaacaaaaacctcatcttcttttgtctccgaaagacagttgacgtggattccagcgacttgaatgaaattgtcgacgagcattggatcacatgacgcgtcctttgtccgggacgagggaaggttcacgattccagcggcctcatgatcagtcgcgaacacttgttcaacgccacgataataatcagcgtaattgacaactctgcggaaggcttgatatacggcgaatcctttaagaccgctcgactctcgtgaattggcgatggagtccactcgagaagaatcaatcaatcggttcatggagtgaagtcgaacgaagagaggtgtattctggccgaaggggtgcaagctgatctcaccggttgcatgtgtggtgactttattcttgttggactcacgagtgaagagggagaatgaccatgtggagtcacccacccgggcgcgagtaagactcaacataacatttcccctagggttgagcacaagcggagccgaaatggcaaggtctttcaggtgaggcatggctggtgatatatcgttttctgggcgaatcagtcccgccgctcgaacaataatctcaaagtagagagaggcagggcagaggttttgatcaagtactgcatggccttgtgtacactcctgataaagagggtcattcgtattaatggcaaacacacactcggtcggctgctttgtgagcagctgcacaaactctttcggggcatcagaagaaggcacagttggcttgacttcaggcaacgacgcgaaggcatttgggtcgtatccaatccagtgacgtgtttgagcaaactggtaaggtgggaggttgatccagttgtagctcttggcttgggaatcgtggaactgccagaactgtaccttcacacctctagaccaaaggttgcacgtagcctgtgaaaggcttctgtgggccagtgcgcctcccaagtcgagcgcctggtagacatgcccatttgaaaaggctgccactgtatcgataacccgtcgtaccaacgggatgatgggagatgcggatcccgcctccagccagatagcagggccttgaatcctctgggccacccgctcaacggctgtctggaagtcaactcgtctgcggctgtgatccacaatcttgcctggggtaacataagtccagtcatcatactgagaacaagcctcaatagggatagacaatggcttgtattgaagctgctgggctaccttggtcaggggaggaacaatgttatcgaccaggcgggaatggaaagcatgtgtgttcttcaatctctttgtgcgaaggatggagggggctttcgccgacagtttctcaatcatttgtagggatcgctcgtctcccgccaatatggtattacgtgggccgttgacacaagccacatccactgccacatctgccatatgctctgctgcacgattcagcaaaccctgtacctccacctctgaaccctccactaggagcatagctccacgctcagagccccacatgctgtggatcatcttggctcgctccgagacaagataaagagcatccgaaaggctcaacccgccaccgacacagagtccagtaagttgaccaaagctatggcctataattcggtccacttgcagtccggaatctatccatgactttgctgatgcatattggattgagaacaaaatgcagtgaaggctgacggtatcttcaattgggccaggttggaagatactcggaaagaggctcggaaggtcaagagtttgacaaactttttcacattccgtctaagacagcgcagatggactgttagcaaacaaaacatagagaaatcgagatatttccaaggcttaccaagtgatattgaagcagttcacactgattaaacaggtcttcggaaatggttgcttcgttcccattttgcccaccaaagcacaagacgacgggcagacgggccgccggttgtttctcaagatttgtagtctcacgtgatattgactcaagcttcgcaataagctcgttgggtcgatctacaggaatgctgaatgctgaaacgtagtccatgtctctgctctgcttgattgccaagttataggctgtgtcttgacaactggtcagttgtgcatcgcagacgcttgaaagcagagctttgcagtatgatctgagtgattcaacggtgttggctgctagaataacgggcacctcactagggaggggagaaactggattcgaaaggccagattttgctttgtattgtttcacaacaagagccgcgttgcttcctgcagctccgtaattggtcaccatcgccacagcagtcgaagatgaattagcagcggagggccagtggatagacttggttggaattgcgattgctgcatcgtccaatgtgggaatcttggggttcagttgaacgaaattggcctgcttcggtatctggtgtttctgcatcatcaggacagtctttagtaggccagctacacctgaagaggtttcagtgtggccgatgttatctttgacagatccgacataaagcctttcggtgcgcgcaggtcttccaaacgttttgcggatgctctcaaattcaattgggtcacctacttgtgtgccttgttatttgtattagtgaatatatctcaaattgttggtgtggcttgacaaacctgtgccatgcgcctcaacataagtgacgtcttctggacgaaccccagatgtcacgagggccttccgataaagggatatctgggaatccgagtctgggacagtgattggagagcggttggacccctgattgaccgccgacccaccaatgatggcaagaatggggtctccgttatgaattgcgtctttcaagggtcgtagaacgaccagccccgccccctctccacgacaataaccatcggcactcgcatcgaaggccttggaagcaccagtaggtgagagaaaggaggctgccgccagattttgtgtcactctggggctggtcatgacatttacgccgcccgccacggcaatagaacattcattagtttgaagtgcctgcagtttgttaccagatcaccgagtcagtcacttcttcgtcgcccgagaatatcgtggtttgaggagtagaatcgaatatggaatcttaccttgcatgcaagatgaatagacaccgcagctgaggagcatgcggtgtcaaccaccaccgatggcccagtccacccgaaatagtgactaagacggccagtacagaacgcctggagtgttcctgtagctgaaaaggcgttcgcgttgcttgatccaacattgtcagtatagtcgtccgagccgacaccaacataacaaccgacgtcggttgggatattggaggtgcgaagaccacaatatccagctgactccatagcctcataccctacctgaaggagtagtcgttgctgggggtccatagcctccgcttctcgggccgaaattccaaagaagcgatgatcaaacacatctggattagctagatagtttccccagaatggcccttttggctcgcgaagaaggttttccatcttgaatcgctcgttgggaagtgcgttgacaccacaccgccccagctcgagcatctcccatagttgctctggagaatccgcttgggcatatcggcaccccatgccagtgatggcaattgggatcactgtcgggccgataggggccatatcaattgaaggcctcgatcgagttgtggaagatgatctgtggattccatttggcagaattgcatgttgttttgtgtctgaccacttgttgttcaagtgatctagaacgcgggttctgactagacgtggaacaaactggccagttccaatgaccacgaaggctaaatcgtcatctgtctctctcgcttgctcaaatgcggctgaaacagttatagcccactgtgatggcttggtcaggattgattctagggcagttttgtgaatggcaaatcgtttcccaatcacatggccatcgacattagacctcagtggaagaacacagggactagtccttgctaacctgaacctggcatctgtctcacaaagatctgcaaggtattgaacagctgtgacatgtctcgaatgatgaaatcttcccttcaggtcaatgattttcaccgacaatccatgacctcctagctccttggtcaaatcatccacttcatcttccgcgactgtgactgtgactgaggttgcatccgtaaagcaggagatgtaggcctatgtgttgtcgatattagattatccgttcatcacgtatgtggatcctcggcccaatatcaagtcacatgatacccatatcaacatgtgtcccccccgttgatactcccacaacctcgtaacccactattaagcagagggaagataatttgaagtagaataacatggggttattggcggggtggatatgttacgcaccgttgaagagctacccaacactcgatcgagttgttctttctcactatccgacttccatctcaaagcaacagatcgggccggaccatgcaagatgccatccaggtcaactgctgctccaatgcaaactgccaatcggatcatagtggatgcgatgtcctcaaattcgttggaatcattcgagctagcgactgcgaccgccgctaagaagccgacacaaaacccctgggcatccacgattctgcacctgttctgggactcttctttgaatttccacacatcgattatctgtcgaataacagtaagaggcgtcatgaacacattcattgcacttttgggagcagctgtcgtcccctgaacacattcagcaagcactgtaagttgtgtcgctccagggattgaggataaagaggaccaagcatctgtaatgggcgaccatagcgacggtagttcttgcaagacatccttgaggaatcccaacgatggattttcgtcgatgttgcggctgatgtaaaataaagtttcatcaatctcggaactctgggggccgaaaacaacacagacgggccgacccggggttttgggtggttcggccatggcaagttgaatatgtaaagcaagattattgtgaggaataagacaaagcgaagagaggcagatactcccaagttggtacctgatgttgaacaggtttcagtgtcaagaaggaaccttgtccatcgaggcacatcaaggttataatggaaaaccgagggtttagaaaaacaaataccgatacgacctgcatacaatatctgagccaaaagcatgtacggactcaccatagatgatagataacccgatatagcagtgtctctcccttgctgtttgactctaaagctgaagacacagcgattctgcacgcaatatccacccagctgcgggatcttcaatggatcagcaccttatggcgaatataccgatatccagggctcaccttctcgggggtggctggctgatgaagatagactatgggacggaacccccgacaaacttctgaggcatcagacttttttaactacactcaataaatatattacatacatatgtacggagtatgtatggtacgcttaagttgtcgtttcattctttggagtggtatcaattggtattctctcgaattctagttcgccctgccgtacggagtacgtactccgtacggtatttcgctgatttgttgatttgtttaaggttttcttttcggatgtttaatttatttctaatttatattttaatacgagtcaattatttcatgctaggcacatcggaatgtgacattggcatcttgcattcatgaatgtttatttatttcctaggttagataatgcttagtctacacccgtgccagggaagaaagagtccgtggggatagcatagtccttgctttatcgtgctaaatatatatcttgcttggctctgactctatatggagtaatccgtaggctgaaagtgattagtttgttgtctcatttttattatggctcaaataattgcttgccctaaagcatacatagctatggcagctttgggaatcgattagttccaaatttgaatcatcaatatatgttgggttgagtacaggtttggcttactatggagtatcttctttatgcttccccattcaccgagccttcaatactctgcaatcatagacaagcattgggggaatgtcacccaagttaaagaatttactagtcatgctagtgccgtcattggtcgaactgttatagctcagacgcaaggcatacggaataaaaataattggaagatgatcagacagagggtaatttcccagtacaaaaatttcacaattagttaggcaattgcaccccatacagggatactcttttgaaacattatccaagttttcatccgaatccagttgtcagccacatcacgcatggctccagaagaaggcgaccaggcgatgagccacgaagacaaagctgcgtgttcgtctctgaacacgacaagctccacagagttattcgacggagcaccatcaagtgagaatgagcggcttcgcattcggcaggctgcagtggacgcaatgcaccatggatctcccaaaatcgaccctcagatctggaccgacgtgacttctcacctcagcggttctaccacgatagatgcccgccaacgggacattttttttgagaatttgacggtccatggaaaaggatcctcgctacaaatccaaaaaactgttctgtccgcccttctataccccattgcgtaccctgtcaaacgactcatgagcattgttggtaacaaaaaacctcacaatgatcgaagaacaatattacatggattcaacgggattttaaacagcggcgaattgttgctggtgctcggtcgtccgggtagtgggtgctcaacgttcttgaaatcactatgtggctaccttgaaggcttagatctcgacccagtcagtgagatccagtataggggagtaccattcagagtgatgattgaaaagtaccggggggatttagtgtacaaccaagaggcggatcaccactttccgaacttgacagttggtcaaacacttgagtttgcagcgcatgcacgagcaccgcataatcaagtaggcaattcgagtcgagaccagtatgtcaaatccgtggtgaaagtggttatggatacatttggtctttcccacacatacgacacaaatgttggcaacgactttgttccaggcgtcagtggaggggaaagaaagagggtcaggtaagctcattctgttcggcttggagcaagaggggagaaggaaagggtatgagaactgatacaatagttggtatgaacagtattgcggaaacggttttgtcacggacttcgattgcggcctgggataacagcacacgtgggcttgatgcagccactgctgtcgactttgttcggtcccttcgtacctcagccaaactagcgggatcttgtcatgcagtcgccgtataccaagcctcggaaggtctttacaataccttcgacaaagtcattcttctatatgaagggcgagaaatatattttggccctcgtcaaggggctgttgcatactttgagacgatgggatggaaacgaccaccccaacaagtgagtgcggatttcctcacagctatcaccaacccaggcgagcgacaaccacaagttggcatggaaaatgcagtcccccgcaccccagtagagttcgaaagttactggaagaacagccccgagcatgcagagctggagacatcaatgcgacaatacaagatgaagacccctcttgatagctcggaggagatcaaattggatgaaattaagcgccttgagcaatcaaatcatgctcgaatatctagtccctatcttctctcggtgcctatgcaaatcagactatgcattgtgagagcttggcaacgcactcgcaatgatatcccggccttgattgctacggcagtggcgcagacggtggtatccctgatcattgggtctcttttttacaatataccagagaataccgctgggctcggccagagggcatcggtcctttttctcgctgttttgacaaatgctttgatatccttgttggagatcaccactctatatagccaaagattgatcgtggagaaacaagctgcctatgcctttgtgcaccctttcacggaagccattgcagaagttattgtggatttccctatcaaacttttccgatgcctcttatctgctatcatcgtatattttcttgcaaatctccggagagaggcctctcatttctttatctacattatgttccagctcacagcagttatgacaatggccacgatatttcgcactttggctaccgttaccaggactatcggacaagctatggctttggctggagtcgtgattatctgcattgctgtgtacactgggtttaccgttcctcagttcgatatgccgccatggtttggatggatccgatggctcaatccgatattttacactttcgaaggcattgtctccaatgagttccacggtcgccattttgagtgtgtggaatatattccaagcttaagtttcgagcagggactatcattcacctgctcatatgtgggatccattgcgggggagcggtatgtctctggggatgcatatattgcaggcagttacgattactcctacgatcatgtgtggaggaattatggcatcttggttgcttttcttgtcttcttctatgtgctttacttttggctcacggagttgatcccaggaaccacaccggcccacgaagtcttgatctttcgccatgggggtgtgctccaaaggttggttcgaggtgatctggaacgcggagagtctatacgtttgcaggaggtaaaatcattggcctctgaggtccattcatcaaaagcagaacaaaagaataccttcagctggaaaggactctcttacgacattccagtcaaaggtggtgaaaaacggcttctggatgatgttagtggttgggtcaaacctggatcactcacggcactcatggtatgcattatttccctcttctgaatccatgacttccacctcacaggcattgacatgaatatagggcgtttcgggtgctgggaaaacaacacttatgaacgttttagcgcggcgtatgactatcggagttgttacaggagatatgtttgtcaacggccgcgaacttgatgctagctttgcccgaaatattggctatgtccagcagcaagatcttcatgtggagacgtgtaccatccgtgaggcccttcgattcagcgcagcactacgccaaccccaatctgtgtcaatggaggaaaaatataattttgttgaggaggtgattcagttgctgggaatgcagaatttcgcagaagcagttattggaagtcccggtgatggcttaaacatggaacaaaggaaactgctcagcattggagttgagcttgctgccaagcctcaactattgatctttcttgacgagcctaccagtggtttggattcacgaagttcgtgggctatctgcgcgttcatgaggaaacttgcggaccatggccagcctgtcctcgccacaatccaccaaccaagtgccgttttattcgagcaatttgatcgtttgctgtttcttgccaaaggcggaagaactgtttattttggagatatcggtaaacaggctcggacggttctagaatatctcgaggataaaggagctcgtcactgtggcccaactgaaaatgtgagttcttcggctcctgacatacttgaaatttgctgatgccatctcttctagcccgctgaatacatgctcgaggtcattggagggggcacccaagggcagtctacgtccatcgactgggttcaggcatggaaaaggagcactgaatacaacaaacttcttggggagctcgacattctcgcctcatcaccatccaacggtgtgtctgctgacccctacatggtcggcgaatttgcaatgcctcttttagttcaattctaccatgtcatgaaacgcgaccttcaacaatattatcgccaacccgaatatattttggctaagtttggcgcgggtgttttttgcggtgtttttatcggcttctccttctggaagtctgataattcaagccaaggctttcagaacgttctgttcagtttgttcctcttgtgcacaatattctccacgctcgtcaaccagtatgcctttgccccaagcttgatgctaacatctgacgatactgactgcaagcagaatcatgccgaagtttctctctcgacgaacgctatatgagctacgagagagaccagctagaacttactcatggaaggtgtttattctgtgtcagatcctcgttgaactaccgtggcaaaccttgttggggatatgtacctgggcctcattttacttttcggtttacggcagcggccaaagctcccagcggcaggggctagttcttctgttcaccgtacagttcttcatatttgcatcaacctttgcccaacttgtagttgctgcagtccccagtgtggttctagggagcatgctggctacattcacatttctcctgtgcctcttgttcaacggcaccatgcagccacctagcgcattgccgcggttctggatttttatgaatcgtgtttcgcctctcacctattacgtgggtggcatcagtgccactgcattgcatggtcgtccgatccactgctctaatcgagagctgagagtctttgacccaccacaggggcagaattgcggtcaatatctggcggaatatctcaaaacagcacaaggaacgctctccaacccgctttctaccgatcagtgtcaatattgcccacttcgggtagcagatcagtatcttgctgcccgggatatctcctgggatgaccgatggagaaactttggaattttctgggtgtatatcatcttcaacgtcattggtgctgttttactctattatctgtttcgagttctaccctatataaggaggaaccgcacccagaaatctcgaaactgaccttctgatatcggtactccactttcctcttcaccactcttctcacccaactttcatttgttttcatttttctctcgatccttttgtcgtttttctattttctcttataatatctttgtgtgaaaattccagtttaatgccgtctcacttggatgtttgttcagttaggaagtcaagggtgccgtacttcttggcacggggacgacgggagttacgtaatgggcggataaaccaataatccgcctcgctgtagctactggatgagcagtgcgtaaacaagaagcgcctggtatagataccgaataagaagacacttcgtttatacgaaggcgacggaaaatcgtcgcagcgcataacaaaaaccagtatctctgtttaaggcccggcgggggccatatcccagtctgaaattgttcatcgcatatttacatgtatcgggacattcaggttttctgtattttcaattcccagagataccaaatacaagatgtacccacacatgtatttaatcgggacgggacgatcctttcttggcgttttggtatcccggtacattctatacatacgcgaactgatgcagattacaattattcaactgtctctatcttgcaggatatgcaaggcttgatcgtcagtatcctccacaaatatgtctataggtagtcgctattggatgtgactgtgatactagtgacgttacttcagcattacatcggcagctatcgttacaaatggaggtaaatactagaggcgggatgggatgcaaggagagattaggttaaaataattcttaaaattgtaatgcttatctggtatacaggtaaaacggaatcagtcactgcctatctcatgcaatggagtcctgtgcgatctgccaccgaaccacagcgccagcctctctctgcaagggctaacagtgcattgtgacacatatttcgttagtatgctaagcggaaaatatttctatgttgtagagtatgcgctcatgttgggggagctgacatacagctactggcccaagcctgcgtctgcaatgcgcaatgcgcaatgttttactcgttaccaagctagggttatgaacccgcattatattttacaaccttttcatatatacaatctccgagtgtatcatgagtaggtagcatggttatcagtcttctgtgcatttaaatttatgaccaaagctagttcttctcccattccaagtgttctttcacaatggctgtcgacaagttaccattattggccaagttggaacctgtgagcctgatcggcttggtccttctatcggggctattttttttattgacagcaacacgaaagtccgacctccctcttgtgaacggaaagcgaccctttgagtttggaattgccaaagcccgccaacgatatctgaagaacgcccatagcctaattacggctggtctagagaaggtatgtgattcaattctcatctgggtacataattggggttactaatgcgtaggtctaggctggtgcatttcggatcgtgacagaaaatggcactagaactatcttgtcgcctaaatatgctgatgatattcgaagccaccgtgatctgagcttgagtgctgctttagttaaggaacatcacgtcaatatcgcagggttcgacgcagtcaaggtcactgtgacatctgatatcattcaagacactgtccgaacgaagctcactcagaatctctgtacgacatggaaattcttcattggcaataagagttgctaatacaaacagtgaatattacggagcccatgtcagaggaagctactattttgttgaaggcacagtggacggacagtaccggtaaatgcttctggatatgatatcaatcagacacaactgacttatttcattagagtggcatgatgttgcgctcagacccaagactctaggcatagtcgcccagctatcctctagagtatttttgggtgacaaagtttgccgtaatcccgactggctacgtctcactgtcaactacactattgactctttgatggctgctgctgaacttcgactctggcctgagatgttgcgcccaatcgcggctaagtttttacctaaatgcaagaagattcgcaagcagcttgaggaggcccgcaacatcattcaacctgttattgacgagcgccgactggcccagcaggcggcaattaagcaggggaagccccaggagcgctaccatgatgcgatccagtggctcgcagagaataccaaagaccgcactttcgaacctgccgcaatgcaattggcactctcaactgcagctatccacacaacgactgacctgcttacgcagactatccttgatctttgtggacgagaagaacttgtccaagaactgcgggaagagattatttccgtgttcaaagatggcagttgggataagaccacaatgtacaagctcaaactgatggacagtgtgatcaaggagtctcagcgagtcaagcccatggcgatcggtaaggaactattcatctcattttaaaacagcccaggctaaccaacgatggtgaatagctaaaatggcacgttgcgccgaggaggatgtcaagctttccgacgggactattatcccgaggggtgagataattcttgtttcctgcagtaaaatgtgggacgcgaatgtgtaccccgatcccaacacttttgatccccatcgattcctgaagctacgccaacagggctcagaccaagagagctttgctcaactggtttctccctcccccgagcatatgggattcggctttggaaaacacgcttgccctggaagattcttcgctgccgccgagctcaaagtcgctttatgtcatatcatcatgaagtacgactttaaggtggcagagggatgtaacccacaggtgttgaaatctggtatgagacttgcggcggacccatttgccagaattgctattagaagaaggcaagaagagatctctttctgagctcttcccaatttccagctctggccgtagttggctacgagttccggtcttttgacacttgatctagcccattattcaacatgcatgtgtattttttcctgcaaactccatgtttcttactttatcaacggagccaaagtccacaaataatagactgaataacagaataaatctaaattaccagattgtactttgcatgaccggaccttgtggagatggtgagtgaataatagcttttctcggagattaaacacaattttcaggatctgctttagtattttaatcataaatactttattcaggggatatagatgaaaatgatatatatcaagttacaaacatagatggagctgccagccagtggctgacaaatacgacatgctggttgttcttatccagtccgtctacatatatcccatagttactagtctgccatttagcatagcatattaatcacctatcaatctcctcctacctatttacggactatgaaataggctgaactaccggacctgtgtgctaggggttacgaatcttggattgagaaagacgagctcgtactatgggtaaatcattaaatattatcctatcgaagagctcaacggctagatgacaatgaatgagatagaagcccgaattgccgcagcctgatcaagggagcccattactcctgagcgcgcttccattctgcgtcaaggttgttgccaattgcgttaatggcctcctcctcgagctcacggtgagagagtccggtacgcttggagaccttagattccgactcttcacgcgacatttccactatgatcgaacattgtcagtcatctatctagtatctaagaatgtgaggaagcataccgtgtaaataaacagcggctttcttgccagtgtacattgcatgcgggacattggtgctcccatcgctgttcgcatcgcctatggcaaagacaccagactcgctggtacgcatcgcgctagtaacattgatcttattatcaaccaaggtcaggtgcatcttggctggaagtgtcgaagtctggacagttgggaagttgacaatcaatgcattccgctcgacaggctcgccggtagtgaagtgaaggcgaaacttgtcaaactgctcaccgtcctcgcccctgccatcgccgccatcctgcaggcgctcaatggaagagattgtgcggttgtcgatggtagtgttccaagcggcaagttgttccttccagtcttcgacctttgccgttgcccgggcttcgccatccgcggtctgcgagccgttcacaaacgcgatgatatcgctatacagagtgtgggtttccaacacattacccagcatatcggtgatatcaccgatcattccaaagggctggtccctgtgctcgtagccatcgcaccacggacaccagaagataccgtgaccccatcccgcctgaaggccaggagtcgcgggtagaacgtcacggacaccggtaccgagcacaattttacgggcagtgtagttcttgtctttggtggtcactgtaaaggcagagaaatccccctgtgggaaaggaacgatggaatccacggtttcattggtaaagtgagcagttggatacttctcgatctgcgcgcgagctagacctctgaaagtagcagggggtgtacctgaggggaatgagatattaggtaccaaacattgtgttggcatagaattagggcgcaatctcaccatcgtttccaatgacatcgtgcatttccctggtcggggcattgcggtactcctggctatcaatcaagagagctgttcggcggacacgagagacaccgctgagtgcactcagacccgcaggaccaccgccgaccacgatgacatcgtaatcggtcttaggcacttccacagcagtggcacatgccaccaaggagacaaaagcggacgcgaatgttgctttgatgaggaccatggtgaaatatacgcgactgatgagctatcctaagaccgcacggcagcagcaggaaggccatttataggcgtcccaattttacccacaatgttttatggcccaaacatgtacacatctgtggggacactagtcgacttcgtgcatcttggattgaggtggctgaagctgaagagatcgtcgggatcaacaagatcgtcagggattcacaaagatcttgttcccttgtgtatatgatcgctgatcccaagctggctgtatggcgagaaaataatactaactggcaatttacggaaggaatgtgctgtagagaagaactgtagacctcctccgtatgcttggtagacttagggcataaccttgccaatactcgatgagcactagcgctattagctgcgggcgctagtgtatcaaccggcgatctcattggcttggcgggtccgctagttcttggcggcatcggccctgaatatggacttccctcgacttccctcggcacttgaagaagtgacccttgctttctacctttcattcgaaactctagagacaagcttgggattacatttagaatgcgttatattacagataattttgataagtagcaggtatgggaggaaatatgcctgtgctacattactttgagtggaatgaacgtgaagggaaatcagttcttgtcaggtatgtagtgttgtaacatcaaccttcgagttcaccacaataactgcgtaggtaaaatatagaggaatggatacaataatgcataattgagcttggccactacttaggcctaggccttataaatccatgtccgatttcacaaaatttaacaagcctgcaaatggaatgaggcaataaactaattttcgagtccaatatttttgctgctgggattgacgaaacatcgaataaccaacccgttggcccttgcatttcagaaggaagcagcaacaggatgtaagggtacaatgcttacaatgcttgcaggtgcattggtgggaggtcgagtaaacacagcacattggtgtacttctaattctcaattttaggatactcggaaattcacaacatatcaagctttatgaacttaacggccatccgtggatatcagtgatggcaagaagtcacgagtaggatgaatagtagaatatgcaaaatgggatatcacaaaaagcagaaatctcccggtctataagcaccgatgccaaacgcctcaatctatctaacagagtaaactagctttccacatctccagttctgacatcataattaaacatcttcctggtcgtcaagtaacaataccttcagcttctccaatttatcttcacagtgcacttccatctgcatcaccacgtcaacggcatcctttctggtgataagcagctgcgataccagccaaaaattatacccattcctatagaaccccattgacgcccattcggcacttgttattctattacgcagtgcgatccagtaatcacgccagcgggatagagcagtccggatagcaacgaggatggaatcttcaggaatagtggtgacaccgacgcttttcccgcgattcttgaagtggcccctgcatataaaagaaccgagaaatgtcatgtgggtgttaataaatgagaataaaactaaacagggagtcagccagtgcaagcaacaagaataaagctctctgagacaaggacatactatgaatcaagataaacatgtctaaagcagtgaggtccattgggttagattcgggtgcctcgtcaaacaggttcttaaatgcctccgaaagcgtaaagccgcgtgaaaagcgaaagtttgtctccgcgaacgggtgctcggagaagaaaagcaattcatcacagggcagatcgcattccatttcagtgtgtgtcaggcgacacgggtagttttgaaaaaagaagaaggcgcaatcgagcagcgaaatcatagaaatagtcctgtcgaaattagtaaggcggacatgaaaagataatactggaagataagcacctaatccgacactccttttggatccacaagtgctccaggacctggtcatcaggaaggtgacgggatttgacaagtccaattcgtcgagcaaccttaacaacctcaccgaatcgattctccattgcgcggtttcgagataaacggttccccgcccagtattggacaatggtgatgataaacccggcctgaaaattctggaaccattcccaatcactgttttcctcatcgtagcaccggccacccgagagcatggctctgatttcggtctccgccgagaatacatcattcgcaaagatgaatagctctgcaagatccagcactctcttagcgatgtatacctccctctggtcactactgtacatcgcgcccataaagactaccgcggctaagagcggcaggggaactgtctccgggtcgaaggatataggaagcattgcacagctaggctgccagtatttgaaatagagcatgatgtattttcgtatgcgcgtggtggtcagtagaaaattgagattcgcagatagttcctcctgcgctttagcatcaagcgggatctgccatgcttgtgtcaatattaaatgaattaatgtcgtcgcgaacggtcgctccggttcgaagataggtggatctccgggaaatgtagtgggatgctgccctggacggatggcggatcggtagttcagttcaccagtatgataggaattttccgtgggcttctgtccatcaccaaaagggccgtggaaaaagtccaggaatgtatcttggaagaactgcggcgcgacagggtcgcaatcgatgaatccagagccgtattccgaccgagcggtatcgatgttatatggaagccctatgccctgcaattcctctaggccatttgtattatgataattgagactgcgtgtacgatcactgtgtgggggaagccggaagttttccgtgaagctgtcggtgccaccattaagtaagaacttgatcgatcctcggtcggatgatggctcttcacagatttcgggtttctccggtatttctgtgtgatttgcatgagtcttccattataaccgaatttatcaaggcttgttgtacctttttcaatccctagacggctcgagccagccgtccgctcgttgttgcatatcaagtttctcttctgacacgatccgcaaggacttcggccatcgcatcgcagtttcatcgaggtacactattcgagcagaataaagttagtacatatgactgggtttcataacgtctagttgcgactaaccgattgacaagcatgtcgccgtctacccctctgacctgtctctggaatttcacgatccccgcgcctggcgcagtcggtataatggacgcgcagattgtcactaattccaagtgttagattgccgagttgccattatagattgtctcggcttgtctaaccagcgcgcgaacgaatcattgcaaaatacgcaggaatagggtttctggccggagtctgtggaggttcagtatgttggatagctgcagtacggggcatacatacggcgcaaatgatggcgtttgaggtgatcaattcgcgtgaacgcacgctgacaaacgtcacagcggaagtgcttgtctgtcggcttcatggtggaccaccggggaggaggggaatatccggggtaaagaagagagaacgaggctgcacgggaaagggtgaggtatcggtattacattgatgtctggagataagaggtatcctttgagccttgataacgctaatagatacttgataatattaccggtcgagtatggtatggtcagctcctgatcttcatagcaaataattcttattctacctcatgttagcattctgatccaaatcactccgtaaatattcttatttgcatgaatagttttgatatataagatcatgaagcccaagcccgtccaatcgtggatgaaaccaaagtatcagaagagataggggtagataggtattgtttatcgtcttgacaaatgccctccatcacgtacaacataggcgctgtttgatgatagcagatgctttctgaaggcatcttttttgatgcctttttgatgttctttctgattactttcctatatggcaactagagcaaaaacaatagaaacacgacaagggcaatcttgtcatgatcgtatgtgatgctacaagggatataaaattgaacaccttttgttgagaattcataataggctaaataataaatcattctagagactagaactagccgtgagcgctaagagaaagctgctacgataggaaaggaaggacccaaagaaatatatagcaacaaccttgaatcatttacggtgatttatttcaggacacaaatacggaggagtcctccgagtcttggccttgatcatatcgtagcagtctctccacctcacaatagaacggctagccctattacagacgacctagatcaccttgtatcggattcaggaattatgcatgaaatacattaaattttgtagagtgcttggggtactttgttccgtatgatacttttgatttgagatcctcaagtcatgaatatttcgatcgtataagtcatgccccttcatgtttcagattctttcatcagtcaaagtcaaattttgaaaaaaacctgtcaggctcaagtctttgaggtgtagaaatatcttttaatggaacaaagaggcctgagtgtcccgaggggtgcgtgacagcatgcatgctagccttctaaggttgactttcctccccgttagcatggaagttctcaagaccgtcaatatttatgagagggaaacattcatatttgatagattatactgcaccttcaatagtgagatcaccctttgcatgtaggcagttgatgtacataccaacttactacccactttgagactcttcctatcaaaagactgtggagtgtgttcagcccaaatgattctcaatatatactacgtacgcatccccgtccgagaccgggctttgaatttgagtttctttgtcttctaacctagtccttctcaccctcgtccccgtcatcttctcatactgtaaaaattccgaatcactagcttccaccgtacatattgtggtgacagatcaccaacccccccccctgtacaatgtttgtgagccagctggcctggccactgatgctagctttggggaccatgacagtggctacagaagcatcgacggcaacttcaacctcctcctcgaccggtgtcgcgacccatacgattcaggtgggacctaagtcaaatccacatcaatttgttccaaccaacataacggccaacgtggatgacattgtcatctttgaattttacccaacaaaccattctgtcgtaaaggcagattatctcgctccttgtgtaccagcaagcggaaatgtcttttattcgggagccttcgtaaatttcaacgagaacgatggacaacttgttgggccagtgagcataataaattggaattgcatgtttaaagcagtgtggctaatatatgcaatgtagcctccgacttggtccttacgagtcaatgatactcaggtacagtatctagaccaaacatatgcccacaaccttggacggagactaacaatggctccatgtagcccacttttttctattgcactgcaatagattcatgcatcaagaatggaatggtcggagtgatcaacgcggtatgactcttggtttcttccgagcatggattcaggctgactatatcaaacctacagaacacaacccagtcatgggaaacacaacccagtcatgggaaacacaacacgaaatagccctgacgtacccttatatgctagtgccaggccagtccatgcccgcagaaggcgacggtagcagttccagcagcgacaatagctcttcttctggcggtaagcatgggcttagcacgggggctattgcaggtatttctgttgccggtgtggtcttcgtgagcatattggtggcactgttcttcgttttaggccgcaaccgcgtatactcgcagtgggtatcctcggaggatggacgcacggaaagaaccgcacgctgggcactgttcaaccacggcgagctatacaacaacgggaaaagcgaagcggggagtagtgtcccaactaacaacctagcccctgtcgatataaccgccgtctctagtcctgatcccaatgtgtgcacattgtcacctcgggcacgagttacctccggtcccggttccctacctatgcagcagggacattggagctggaatgagcctcctccgcgtgcccgtgcaagcgcgatggccacagagctagagggccatccaattatctgggaggcaccaggcagtactccggagtatcggtggtgaacaggttgaagcgagcctcgtggagtcttgtaataagcgagggttatggtgttggcttcaattatttccctttcatgcgcaaatgggtctctgcctttcttatatgttatatcaatacctgtgatttattgcttgtaatatataattccttttgaaggcgtcatttaccgtctttgtggataacgatatttaccagagtcctatctacagtttacttagtgtctgtgttttgtcgacatgactcatctgcacgtggtcggcgagtgatttctgcatgaacattatatgaaggttagatcgtgagggttgcgtctccatgtagtataggttcagtggaaggaatatcgagatgcgctaaatagacgataatcgtaataaaaccgaccataacacagttccgaccgcgttaaaggccttagagcgcgtaacatacgtatcgagttcgatcgagattacggtattattggttagccgacttcccacgcgtcgaaaatttatctcccaagtggattgcaccttcataaaccatcatgtccacaccatcaagacgttcagctttgggaatctcggggacccagaagcaagctcttcgtatttgggcacaaagtcaaaaccctcgtccatcacaatcgcaatgttctgcttggttcgaacgaacctatggacggaacctctcccaatcgaccatctcaacaatcctctctaaaaagtttgatcacctcgatgctggtccagcatctaccttaagacgtcaattggcaccgcaatggcctctcttagagacaccactttgtgagtggcttgcgagccaagaagcgggcctaatgccgccggccgatactattattgctaaagcacgcgaaatctggaatcaaattccggaataccagaccctggcacttcctcactttagtaatgggtggttgaacagattcaagaaacgatatgctgctcaacttcatgatcgccaagatggcgtgccctcacccacaccccaaaatggtcgcaaagaaacgagagcactgaaaacgctatgtggtgaattcccggaagatgatatttacaacatggatgagaccggacttttctggcgaaagcctccatttggcgcttcccccgctcagaaccaattgacaacaaacagggaaaattcccgcatctgcattatgctctgtacaaacagcactgggtcagatcggttacccctttgggtcatcggacatacgcctatgccagaggcacttcaaagggcgaatctcaaagccatggactgccattggcgatatcatcgacaggcttggctaacgcagtcgatcatgcaagaatggctgctctttttttacgacaatataggagagcgcagagttttgcttctactggataatcatccagaccaccaagcagccgtcgaggctactccgccgcctccgaatgtgcatattcaactgtttcctactcaaactcgcacctcggatgagcaacagccgatcaacttgggaatttcccagactcttaaacattactatcgcaggcaatggcttgcgtacattgtggcgggtagagaattgccccaaaacccggtccacatgatgagtctttatcacactatatcctgggccacccggagctggcgtcacgatgtcgcgaacgcaattatttacagggccttccggaggagcagtctaatggacccgcagattgagtttatcactgccccaaaatcacccgatttgacaagtctttatgagaccgccacgcgaaacaatcctgacggtcgaacggttatcagcctcgaaaactttattcaccccgtggatgaggattttgagggcggattaaacgttgccggatttgtcgttgagggtgaacctaccttgcaggaactagatgacgccatcgtgtccatcccgccggagcaacttgtacctcctgctgtggatgcagtcattgggatacagacggccatccggtacttggtacatcagccttggatcactgcgatggaccttcagggtctcgagaggatagagagaatgatcaatcgtctcgctattgaggagcgacgacaagcacacgttggtggtttcgattgaagaagcgactaaggacggtgacagtcgtcctggcagttagtgccttcatctcgacaattaatcaacctgagctatgaaatcgtgggttttttcttactcgggtgaaagctctcagaggaaggaaagttacatctcatatatgtcctgtgcgttatgaacatattgcagagcctggtacaggccgagctccacacagttgacctttatgagtgcccaatatctgtagttaatagcagggctacgtaatttcaagcgcagcaccagaactgatgttagagaataatagctcactaccaccgggcttacccagggtctagtgtaccatctcatacattgatattccgaacaaaggacacctgattcatccaccggactccacgctcgagccttattcgagaattagaaggtaatattatcagcctgcagcattgactggctcgtttttttaaattgttggaatatattatgctgtcttaagatataatggatgtccaaagctcccgtatcaagacctaaaccgtccttgggatgcagaataccaatcaattcttgaggtttttctattttaagctcactccaatgattatatgaatatcagatttcaagttttctgagccgaaatagaagcatatcaactccagatacactgttgtgtctatttggctctttgtttattccacactttctatttaaagcaaaggaggatccgttatgttgttgattttggcctagggtcgatccgtcaatctcgcgttcttggatccgtcggcgctttttgcaggattctctcaagttcacgagtgtccaggagttcataatatcaaagatgagcaggtcaactggaaatgatccccccagggtctccatcaaggcaatcaaagcacaaatcaggcattgcatccagtcgttgaaagaccttacagtaagttatcttgggaggaaagtgtcaagcaaggcagactgctgacttttgatagcattccataatgcgaggccgcggcgatgatactcatgggttcacgatgctatggcccagaaagagcggttccgatgtcgatgtcgatgtcacgatcggttgcgtggacgccggatcctacaaacaactttcgaaggcggccaaatgtgccaaagaaaagagggtcgtaggggggatcaatgaaaatgataggtgaattgttgggagtggaatgatagggcagcccgaaggcgcacagtggtgactaagagcttgcaaagagaaattgaagacgtgacagggacatcgtcgctgtctgtcattttgaagagtaaccaagtgggagccggaccaacatggtgctttgatactttcgggttattgactagaaggttgcgaccattaggtccgtactcgccaaggaaatatgatgtgatagacattatcatttacctttcggtgcccaatgtaccagaaaaaggccaacaagagaaacctacctacatgcagtgaagtaatttggagtcggacctaatagctgagggttgatgtttggctcttcgattggtcgggttcaatcacagattggcgcgcggctgctcacaacacctgataggttggaattgtgtgacggaggatgatgtgcaggagtataccagggtgtagatagaaaacaagtgtccaacacatgaatcgccgaagggaatcgaattgaacaagaaagaaagtactattcaaaatgatatcatatataaaacaggctccgtaacggggaatcgcttttgtgtttcagatagggtccgagaccaaaaaaaaagaaaaccaaaggaaatattttactctacagcatcagtgatacagcccaggctggcgtcctggacgtttctggcatatttacccagagtaccacgcatggtaagaccggtctcagggaggtttccagcagccttgcgggcttcccacttctctttgcggtcagcaaactcagcatcggagagttcaacatcaagaaggcgcttgttggcatcgatggtgatgatgtcaccatcatttacaagaccgatgggaccaccgacggcagcctcggggacaatgtgaccgatcaagaaaccgtgagaaccaccggagaaacgaccgtcagtgatgagagcacaggagtttccaagaccatagcccatgagggcactagagggcttgagcatttctataagaatgttagcattatagtcggagatcaggtagatttgttgcacataccaggcattccagggccacccttaggaccgcagtagcgaatgacaacaacggtcttctcctccttcttgatttccccacgctccagagcggcgatgaagtcatcttcactatcgaacacccgggcctttcctgtgaaggacatgccctccttgccggtgatcttgccgacactaccaccgggggcgagagagccacggagaatctgaatgtgaccggtcttcttgatagggttggagaacgggcggatgatcttctggtcctcggggaagccagggagcttctccaggttctgggccatggtctcaccagtaacggtcataccagagccatcaataagaccctccttgaggagcagcttcaggagtgctggggtaccaccaacggcgaagagatcggccatgacgtacttgccagagggcttgagatcagccaggaagggaatgcggtcggacacagtctggaagtcatcaatggtgagcttgatgccgaccgagtcagcaatggcaatcaagtgcagcacagcgttggtagatccacccgtgatattgacaacaaccatggcgttctcaaaggcctgacgggtaagaatatcgcgagggcgaatgtcctcggcgagcagcttcttgatggcaccaccagcggcgagacactcaagatacttggcctgggagttggccgggttggaggatgaaccaggaagggtcatacccatggtctcaatagcggaagccatggtgttggcagtgtacataccaccacaagctccctcgccggggcaggcgtggcggatgacgtcaaagcgctggggctcggtgatctccttggtaaggaactgaccgtaggcttggaaagcagacacaatatcgatatcggcgttgttctgggtagcagcgcagccgggcttgatggttccaccgtaaaccatcaaactggggcggttgatacggcccatagccattagaacaccgggcatgttcttgtcacatccgggaatactgatattggcatcgtaccactgtccacccatcacggtctcaacggaatcggcaataaggtcacgactctgcaaagagtaacgcattccagaggtacccatactgattgcatcactgacaccgacagtgttgaattggaaaccaatcaagtcctgatcctggacaccctggcgaaccttgttgctcagatcgagcaaatgcatgttgcaagggttgccgttgaaccacactgacgaaattccgacctgggccttgttcatgtcctcctccttcaacccgactgcgtacagcattgcctgggaagcaccctgtgccttgggttgggtgatggtgctagagaccttgttgaggggtttatcattctggaaacgagggagagtggttgagagagaccgactaagaagagaaaagaagtcagtaaccggattgacgcgacacaattgaaccaacttacacagggttagacctggacaggctccgaagagcggcgggcacacgggcccgagtctgaggaagcatgacgaggatggatgagagtatccaaaaaccaccagatagagcgatacaatcggaagtctggagaagagagggggacaagaaataaaaagcggaagctcaagggagtgggtcggtcaatcggttcgacaatcaaatcggagagaggcgaaccctccccgccaattggatacgcgtcgttgtcagcccgttactaggggaatgcgcacatcaattgatatttattcgctatattaatgaacgagggaatgaaagaacaatataattaaaaaagaagcgacaggaatgggaagggaagaaaatggagagaggagagaagacggaggtttaagacacatgggcggcgtcgacggtgtggtgactccgagagtactactatcagatagaaaacctcatcaataaacgacaaaatatgtccagattctattctcatttactgcgcgaagagtgcctagtagcttctaggtaaaccgagtaccttctcgctcacataattcaagatcatctcccgactcacaggtgcgatacgaggcacgaaacaatcgcgcatatatcgttcgacatcgtactcaaccgcatatcccataccaccatgcgccagaactgcccgctcacacgccgtgaaagcagcctctgcagccaaatacttggcactgttacacgcgacaccaatttcatggaaaggcactgatccatcgttggtatcatagagacgtgctgcgtggtaggtagccagctttgccgcctccagtttcatgaaagcatcagccaatggatgcgccacaccctggttctgaccaattggccgtccaaagacaacacggtccttagcgtactccgaggctttttcaagggcggcatatccaagaccaagtgcttcaccggccaaaagacatctctctgcattcatgccgtggaggataatcttgaagccttggttctcctcgccaattaatgtatttgcaggaatcttataattatcaaagaagacctcgttggcatccacagcgcgtccacccatcttcttgatcttgcgcagatccaagccagggctatcacggtctagatcgatacaaaataaggagagaccctcgctggtcttcttaacttcttcgagaggtgtagttcgggcgagaaggatcatctttgaagccacttgcgcacaggtaatccagatcttctggccggtgaccgaatatccgtcagcggttttgctagccaaggttgtgagtttgagggtctcaaggccagtgtttggctcggtgacaccaaagcatgtgcgccatgtgccgttgataatattcgggatggttgtctctagttgttccttggtgccaaacttggccaatggctgtgtcgcatagacgttggcgtgaatggcctgagcaccagccatacctgcgccagactgtgtgatagtctgcatcatcattgtggcctcggagatacctgaacaaggtcagaaatctggatgagaataagaaatctgcgcaactgtacctagaccagcgcctccgagggattcgggcaaagcaatgccaagccatccatctttagccaatgctgcatggaattcctttggatctttctcttgttgatcacgctcctgccaatatgtatttgggaatttggaacaaatatgggagatcgcttcgcggactgtaagctgctcttccgtaaagccagtcatccccataatgtcgcgccgccctgaagtggaaaatgccgcgcgaccttgggggtatttgcctattcgacatagtcctcgcaaaagtgcaggcacttgcgaccgtagcgcgcgttgaaattgtagatacattttacgttgaaccttgggaggagcttctcggctcaaaacataccccgttcgcatatagccgactagcagtcttggcgttctcggcttcgattgaaagtcgacggggtttcttttgcacatattcgtgtcctattgacatgttgctatcaaacatggccaaaattcaagtagccgagccgaattactcgaaaagacagctgcatagaagaccagcgaaactaccattgagcgacaggctggactgaagtctcatctgcgaaagctactccgtacacgattagcgaaatgctcaaggagaagtgaatatcctcaacaacacttgagaatacgatgaaatcttcagaacttaaatatattcgtgctttgagagaagttaagcacagtagcattcatcgttcagccacgtcctgttcagccactctatcgcttgcatccggactctgctctttcaacaattcgaactttcgaacgacttgaagagtagcataataactgaacggtaaagctatgaaccacagaccgaggttgatactcgccgttgcgatcaacgctgttggtacagcctgcacgccaaatccgactgcaacggcagcagtttcgatcccccgaagcaatgagctgtatcgaatttgatcacctggtgagtccgacaaatttccgatacaccagtaaatataattctcaaccaagccaagactgatgcgctcaaacagatacaggccaaacccacgaccgaaggtgcgttgatcactccagtccaacacggggtgggtgtgtcggtactcgttctggataatgaccgcccagatccatgtcgcagtgttcatgagtgcaataacgatgaacgtgacaatcgctctatgcttccgatttttcatccaaggcaggtccaccaatgagccacctaaccaagtcgccatcgttcccacaaccgccgacatgaagcctccgagcgcacgcgcgcggactgtgaaataggtcgcgagatatgtgccagggtatgcttggatccaaccaaaataccagaataatgggacaaggagcaagatcgacttactccttgccagccgccacatcgcactgagctcttcacgccagtggatgccgcggggggcctcgatacgcgttccatcatctctttgcactttctcgggatttgacaagagagggccaatgaccagtccaagacactggatggcgataaaagcgagatacgtctggtacccaacctggccgcgtttatcgacggtgtggtttatgcctaaagagaccgcaccaccaatgatgttgccgaaattgcggaacgtgaaccacgttgcaatgtagcgaccacgtttgtgatgctcagggtatcctgtggcgacagcaccctcaacgctccaaaagaaacccgcgctgatgccgcaagtgacacagccgagatacacaagccatgttgcaccagtgcgattgttcaaatacaatcccgctgcgtacaatggatatccaagtgaccccagagtcagggtccagcgaaagccgatagcgtttgtgatgaatggaccggcgaaacaggtcaatgtcatgaaggcgaatagtaaggcgttggccgcgttgaccaggtctgggctctgggatccgcccacgcccaaaccattcattgcagtccatatacctggcgcgcagaatgcacataatcctacgaccaggatttgaaaaagtgtactgtaaaagaacttgggacgaggtggtgggtgttcatcttgactttccacggtcgttgacacattggctttgtcttcggaatgtactgatgcagacatgattacagcctgggattgcagctgagtaaatcactgcaaatatgatccctgtcatacacagggcctagtaagtccattttatatgatagactcattgtatagcccgtttattggcacgatgcctagataagcacgcaaaatcataggcgcatggcataaccacaatcccgctcggcaattgacgatgaggacataagagcttgaaaggtgtcttctatcacgaatcatgtcaaggctaccccataatattccgctatcttggcagttgtgaggggtcgggctctcgactacaaatgcatggcatgcgcttggctgggtagctcaatctacgatattattttttacgtttgcaaaaaaaatggccacaactacagaagaactgcagattgagaaacttcagttggaggactctatcgtcacattcgagtccttcgacctcccagcttccaaccaacgtatcctcggacaaccacatcccaagaacacagttatcccgcttgcgctgcgacctgccaagtccgacgccaaggcaactctcgacgatttgatagagacagtcaagactctccaagaaaaagacggcatattgaccaagaagctcgcaagacatggcacgctgctgtttcgcaatctaccaatccacaacgcagaagacttcagcaaattcgcgcacgccttcggctataaaccccatgagattattggtattgtagtcgacagaccagttcttgcgccaaatgttgcgcctgccaatgaagcgcccaaggaggtcctgatatacaaccataacgagtcgccgcaagtcccacatgcgcccgagtatatctttttctacggacatcatgagccgtcgaaaggcggggaatcaccgatatcttcttcgttggaattattcaatcgcgcacagcaagagatccccgaattcatcgctgaactggcggaaaaaggaattctaagtaaagtgacataccgagtggagaagcagtacgaaggtggatccacactgaagcaggcctttggcaaggaagtccaagatcatgacgacgaagagacaaaacgacgcaaaatcgaggctcagatcgcgcgctatggcagagggcagcatactacgtgggactggactgatgacggtcttatcttgacgcatcggctacctgtcatccgaacacagcccggtacaaacctaccaactctctttaccgggttggcagcatattggaaacgtacacagttcgatgccgaggcgcgaaaaaacgtcacacagcagctctttggagatgggacacctattcctgaaaaatatcttgcacacctggcgaagatcacggatgagattcgggttctccatcgctggcagaaaggtgatgttttggtttatgataacgtcattgcacaacatggtagagaaccgtggcaaggcgagcagtctgatcgagtgattatggccagtttattcgatggtgaaagcgtgccgggcgcttatggatttggggattgggcgcaggttgtgcaagcacttgattgaaacccattttttttatgacaacacacacttcttactcaacatacttctgcttcatcttgactttcctgtcgtaatttactatggtgtccctgtagtaagatatagcttacggggaactaagtataccaccgggcataatcctcttattgccaggtagtattttagattagttgagtacggtgaacattgtatcaagttaccggccatatactatataccaatagtgaatttgaatcgcttacaagtggtaactctatgtacagtcactccgcaaaagtctccgtcaaatgagataagcgcccacttaactctttatagtaccaattcgaatccataggttttaatagattcgacacccttatttaaactagttttagtatttagaatgaatatgcctcagaggggttcttggaaccatgcttgattttgaaaaagcattgatcaggttagcaaacgcggttgcaaacttggtaaaaaagaaaaagatacctaggaaaacgcgcatgtagggctaactgtgacggagacttttgcggtagaactggaactactagaggttatacaaagccacaaccaactgatctgcacgtcttccgtagatccgatgaacctcgctcaacctggggagaggattttccgagtttttctccctcaggaaatccaagactcctggtgtttcaacccagcaaaaacgttggcctcgctgtgtgatccagatggcggcctcgagtggactcccgaattccggcctagcaccattgtgcgatctgttcacgacagcctcaatggcatcctctggtctatcaaccaaagttcgccaccagaagaaatttgtctgatgaatctttttgtatagggcgtcgacttgggcatccagtcttgcgatttcggcagaaagatcggggctgctcataatacgacgattggccttgattgccgagcttcgggggatatttgctaggatttggtccagtacctcctgggggaccttcggcccaacagcttgtcgggcttgatgtagatccttgagatcgagcagaatcttgattttcaacagagtcaaagagagaaggaaagtgatggtgtctgtgaaatccataaacctagtctctatgtccagaaagtaatcaacatcctcaagaatatcggggttctcaataggtgttggtgctatttgcccaggagggtggtcttcagattcctcccagagataccaggacttgatgaatccataaacctcctcatcctcatcgagacgaatccagagagctgaaaccgtaccagccgcgtagtatttatcgggatagtagagcagcgtcagctttcacaatgcaaccgatgctctgatagaactcttcgtgtaagcatactccatgcactcctgcagattataaattgccatgaagtatttgttcttatcaggtgcgaattagctatccgtcaacaggaggggcacattggggagcgaggaatcgtgagggtgaggtcccagccgagcctcgatggcttttactgtcgcttgagtctgtcgaacatagttacagaactctttgtggtcttttcgatgttcgatctggtgatctttactgcaataagatagcaccctacaggcagtgcagattttcaggtcctgttctttatcgcagatcgcacatcccgaaggtaaagacgcctttgattgaacggtgtggaacaggaacttcggctgttggactgtgatcggagcttgcatcgtgtgtactcgaagaatctcacagccctaatggaagggaaaggggaaatggatcaataaaaaaaagcatatttgacagacagaatttggactaaaactggagtctggcagaataaattgacgcctgagttatacggccttaatcaggcagaatcaggtagaagcaggcagccctatatccaatccaaccaaacagtaattccctccagcacatcccggtacttcatgtaataagcctggcccaacatatgaagcttccgccgatcggtcttttttgatctagtacgtgggactctatcaattaggatatacaacccaggaacataatacttcggcaaggtctggcggaccgcgtcgctgagcgattgggtgagcgcatgcacagcgtgtctctcgctgatcggacggaactccatctcttcaactggaccgctttccatgttcatggggttatttgtcaagtataagaatacggcaagaatgggatcgccctggccgtcaatagctccaagaacgtcgacgacagcaaaatcaccggtggataagttccgccggaggacgtactccacttggccagcttcgacccgcgctccgtcgagtttgagcatactatctttccggcccattagctcgatcgtcccatcatggttgtaccgccctagatccccagagcgatataggcggtggcttggcctttcggggtggagccgggccatccagacgggaggcgtggagaggaagttctccgattttccagacacgtggtctagatatcccctagagagatgaggaccctcgatgaggagctcgcccacggctccgacgggcatcagctggtcaggattatcgggattgacgatccaaattgtaccggtagcagggcgaccgactactgacccacgacccatctgaagattgcggttataggcgcagagggaggctacctcacccataccgtattgattcactacctgtacgcggcccagccattttgccagtaccgcgtctgacactggctcaccaccaatacacatcatctccagggtggggacgcggtctggttccatatcgatggcaactgagggtgttatgaacattatgttcccctccaggtcgttcatgtcattcatgagggattccatcgtcagagatttagtaggaacacagcagcatccgccggcaatgagaggcgccaaaaagtcgttgttgctgatatcgaacgtgtatgaatcgaattggaacatccggctatgtggtcccatatccatgactcggatgtaatccgtcaatgccgaagcgtagctacggtgctcctgaatgattcccttcgggcttcctgtgctgccagatgtgaagagtacaacgcaagggtcggtgggcgtgacggtcgaacaagggactgatgtcaccagtggcaaactggaaacggaagcatcgctgacctcgaagagggtttcaatccggtcgccaaatcttcctttatatccttctgaggtgagcatgatctttatctgggtgcgctcgagaacagaggaaaggtatggtggtgggtcactgccatcaacgcagatgtacgcaccaccagccatgagaacagccagtctagccacaatggcccaggtggatttgtagaaggcacaagcgacatagatatttggtccaacgccttgtcccactagccaatgtgctaaccgagaagttaattcctcaagtcggcgatatgtcagatccccatcccaggagcgaactgcgggagcatcaggggttgtcttggcgtgctgtaaacaaagatcatgtaggagggaatcatgcgtagggccgatagctccagtgaatagggtaatctgttcacgatcttggggcgagcataattcaaggctaccgatggtttgtgtagaagagccatcaattgacgagagagcccggttgaagctgtgcaagaggcttgtagccattggcagtccaatatcagtgtttccaacatccaatcgggcatgtaacatatcgtcggaggtatggtgtatggaaagctggagaccggggaacgagtctacctccgttgactctctcgccggtgcgccgcaacagacctggaatccgtccacgcattgattagacagggtgcgctccgccggttgcttctggtagaatattgtcacattgaagccggaattctcgccgacttggtctgtatggacttcctccgtgacccccatatgggataatgggactaatgcttcaatactctcgcgaaacagatctcccacggtatcatgaggatctacgtggatctggacggtcggcttcgagtagccatgagccgcctcgcctatgtagcattgaccctttggatagtcctgaccaatgtatagggttgtcgagcagcaaaatgctctgattgtagtgatccaggccaattggagtagtcgctggatatgaatatccggatgttcttcctgggcggctaggggagggaggttgagggcatcggcgaggtgcaggagtcgccaaggacgtacctttagggtgaggttgaccctatcggtagaaacatcattgactgctaccttcaatggagcagtactgagctgggaaacaattgtgggttcaaacaggacaggagccatgatgaagatgaagatgaactgtagcaagtgtggagaaacaaatcattacattctagtattagggaaactctggcctaaatgtacggcctggacagggacgaggcatgcaggagatgtctcattgtgaacatgctctcttggcactactccctttgttgaacgaagtgggcaatcaataagacctcgttattgacgccacaggcatttactgcgcgaatcatagccatcggcatgtttggagtatgcaagatgttactcccagggtgatcaattcgtgctcacggagtgtttgctctaatgtgagagcttgtatttggatatgggctgcctgagcgagctagcagaacgggcaattcgagccggggtttttgtggcacactctgcgaataaaaatccaaatggtaagggtcaaaagagacaaacctagtctggccaatcgacttcgaagatcaccgttgatctgcagtgtattttggcactcagtcaaccctggagtagggagtagtacgaggagtcagctgcacatagagtcaatgtactcactccgtaagatattaggtgagagggaattgatttagcagatctaaacttgtctcatgaattatatttaattcatcaaatcaaaattccaactagaatatgaggacctgtgaaaaggaggccgaaaatgaccacccgtgactttggagggctggcgggcgcttcaccgctcactgtcgagtactggcgccgttagccatcatcttccgtgatgttttgcgttcaacggtcgtggtccacgcccaaaatggctccctttgcagtcccaggactaagtgaaattccactgatagtaaaagatctcatcaaggaataaactccagtatcagcctccttgaacttgtaataccaccgacaacgccgtcttggtccacttgccaatcacccatttccacccgttcagcccagctttctaaaactttgtgtagatatgagctacgcgaatccacaggggcaccgacagccctgcctgcgaaacaggtgtgagagcagagtcatcactgggagtagtagggtgctagagaggagaagtggaagtctgcattgctatctaggcctcgggagtgcttttatgccacatagccgcttagtcatcttgctctggaaacccccactgcattagttagttaacagctaactagttagtcattaactagtaaaagatctcaccaaggaataaaatattctctccaatgttctccagtatcagcctctttgaacttgtcaataccaccgacaacgccgtcttggtccacttgccaatcacccatttccacccgttcagcccagctttctaaaaccttgtgtagatatgagctacgcaaatcccaaggcaaataaccactatagccaccgcaaaggtcctcctggtaaagttgatcaggccgttcggttcccggaaacctagcacgtttgaatggaacacctcgagcaaacccattgctgccgatcaacttttaaacgggatcgaagcgacatcccatccagccccaatccatgcatatttaaaaatcaggttgtgaagttgggccgataaatgggggtcaaatgcagtgaatgacatggctgagatgtaggtctttctggacctcggggttatggtgggagatgtggaaagagaggagcggcatcagcctaacaggattggttcgtaccctttacattttgccatctcgtgaagataggtaggggccagggttactttcatagcgaaaattgttgttatattcggggcattgaaggagggttatgtgcagcgtatttgggcactaaaccgaaagagacaaatctaaccggatacataattcacaggtccgctgtgtagatgaaagaattgacaagtcccaatcaatcagacattctgcataatcccagggtgaacgccctcaaggatcgacgacagctcagcccatagtttctcacgggcttgacgcccctcttcactgcgcacaaaaggtgaaagcgcagtattctcgacatgtccatctgtcatatatgaaccgtggctttcgagtccagctgcaccgcccgccaccagcgttcgagatccaacctccgtggatcgcgccaataccattttcatcaatttgaactttaagccagcttcccgtccgagttgtgaatggcagaaaccaggattgatcatgttgatcactacctctgatccacgcacacggcccgccagttcctgcacaagtagcacctcgagtagcttcgataatgggtaccgctcgtccatcttggcttttgtttggtcactgacgaactccattggctgatcttccttccattctgggaaatccacccatgcgtgtacttcactcacaacaaaggtaagtcggggcgtgcgggatggattctttgttcgtgtggctttcagggttggcaggatgaggaggctgaggaatagagtgttgatgacattaaccgtgagagtttgctcatacccctcggcagtgctaaattgcgctgtggcaactgctgcattgagaatggctacatcgagctgggggagctttgaaatgcgctcgccaaaagcaaggaccgaggcgtgggaagccagatcgacctcccacacttcacagatgcttgggcggcctgtagatttttcaatgtcctcttttgcttcttttcctgcagtcacatttcggacgccaaggatcactcgtgctgcacctagtcgcgtgatgtgacgtgcagcttctagccctaagccgacattggcgccggtgatcagcaccgtttggtcggcgaaagactgtgttggatatgtaggagtaacgaagaattgtgagtaaaggaaagccatgatgagtggatatttcgattgaagattcttcaacgatgcaaaagggtacttaaatagcagtgggctaaataggcaacgaatggccaacgtcatggagggcttgcgatccggagattaccggggttaagctcgtccgctctaacatcctatctccatgacctcggcattcgctaaatcgatatccttatgaccgaatataggagagatcactatgtccgaacagaaaactacaactgatgaaataatgtggatttggctggacactttaggtatgaaggggtgtggtaagggtgaatgcttgcaacggatgtgaggcgagacattggtgttatgtgattgggtatgtccgcttctcttacccaacatgacttgaaagtctactctgaagaggttccctttcagaaaacatggggagcatataaacaacgacaatccaacaattccaaagtcgaaatgtctgtttatcccctagaacagaacgaatcaacagtgccctcaaggccaccagtgaagccaatgccatgctgaggataaaacaaagggatgaaacttcccagaacattggactccatattccccaaccgagcatgggtattgcaatggtccaccgcgccgcagtatcaccccagactagaggcacagttcgccgaccgcgtttagcatccccggcttgatcggacatgtcctgcaattggactgtagagaaaataattccgatgacgacaaggagccaccgacctgaccagccaagcgggtggagagggaggaaagagccgcccaatgccacttccatcgctcccgatgcgaaacaggtaaatcctagtccattgataatgttccgaatgactgggttcttgtctgcaccaccccagttattgtaccacacccctaaacatatcaaagccacagaatttcggactcccccggtgaatgcaaggctatatatcggggcaaatatacacaaactgatcataactcgcgtgccccactcgtgagaaacccgaccgccgggaaaggggcgccatggcttgttgagactgtcctcggcaatggctctttgaccccgttggttgttgatagcgaatagaattaagttgaccagaatccatgataatgtcgcgacagctcttccaatagactttggagagtcgctgatattctgcggaggaggcagagcccctgcaacatgtgggtcgtatttcgacgcggcccaagcgtttgtgattccgaaaatagtgtttggtatcacaatggttttaaaatcgctgaagagaaatagccagagggtatatgagtggtaccacagcgaagtcaatgctccttggacaatcatggcacaccgacccatgacggatgagtgttgatgtttcagtcaacgttgatggtatatgttatacctctggcgtgagtcgggcttttatatctgatcaggtggaatccaaggcttgaggccgcaattttgggaatcgagggaactacagaccgtcaaatgagagactaaaacgagaaatcgagcaccgtggcctttttgatgtctcgtacaaggccctgagtttattctaaccagaatatattgccacattagggtacctagatagatattcaacaaggctgggttgtggccatactctccgatggccgagaataaagagtgttgtccaacattgtgttttgcttctctttcaccctgacttttatgatgaaagagccctgattggagctactataggactcgtcccactttgaggctcgaaatagccattgctacagttccaaaatattctgttcgatcgatcatgatcatgctagcttcaggggcagttgcaattattgcggggctactggcccaccagcttgtctgtattcatggagaatggcatctaaaggggcctagggtcgttgttgttcatcttcttgccagtattctattatatgcaaccctttttgttggtcacggaagcactggagccagtttggttcggacaatatacttgacgatatgctatatctcatccctattcacaagcattgcagtataccgactcatgtttcatcgattgaaacactttccaggtccaagattggtcgcgttgactaaattatggcacgtttggcaatgccgtgactcgcgtgggcatctcgtcttgcaggcttggtacgaaaagtatggggagtttgtgcgtaccggtaagatatatcgcaacccaagtaggactcctggataacgttgaaattgaattttcaggtcccgccgaacttaccatattccaccccgaagtctacgaggccgtggatggccctgaaaatcgcaacacgcgttctgattggtacgaccttctatatccccagatatcctcgatctttacacgcgaccgacagcttcatcatgagcgtcgaaaaatgggggagcaagcactgagcagaaaaggtctggtgaactcaatggcttacaaaaagtcgaagactgacacaatcattcagcattgctccagtaccatcggcgggtgctagaaaaggtacgcacactaaaaagcctagttgctttggaagaatcatgccccgttctcatcaacgatctgatgtatttcttcgcttttgactcaatgggtgatttcgcctttagcgaagattttggtatgatgaggaacaagaggtggcattcatcgatagcgatgctgcgctcggcgctcacaatgttgggtccattcagtcctgcgatatggatcccgagattggggttcgcgtttattccttcgctgtggaaggtccggcactggtttcatatgctcgaattttgtgatcagtgcatggctcgacggatggaggtactggaaaccatacgagaaatctaacatctgactgacatggagctagaaaacactctccgatcacaatattgcgtcttggttcatcgaggaccatgtcaaacacggatcagatcccacgcgggcgcggtggttgagtggtgatactgcaacactagttgtagctggaaggtcagtatggttaggttatcatgaggcaatggactgataactacagcgataccaccgctccaagcctaacgcttgtcttctatttcctcgctcgctatcccatgcatgctgagaagatatacgaagagatccaaggagttgatagggagaacccagctgcattggccatgttgccacatttgacgggcactataaacgaagccatgcgattgcttccagcagtacttaccttcagctctcgaataactccaccggaaggactgatgatagatggcacctttatcccaggaaacaccaaaatatgtgcaccacgctatacaatcggtcgacgtgagaacccccttgtcatctcttcaatcggaaatactaaactgagcctcaagttgagacggcatatgtcaacccccatgaatttattcccgagaggtggtacagccaaccggagcttatcaaggataaaagggcatttgctccttttggtgtcggtaagctacaactccattgactggtgcggtcagatctcccatgtgccagttgcgttgcatgggaataataagaggctcgcattctgagtctttgtttcgacagggcgtacaagctgtgttggccgtcatttagctcttgcacagatccgacttgtaactgctgccttgatgtttcattatcgaatcaaatttgcacctggtgagaataatggcgaggctgtggaacgagatatgaaggatcaattgaccgcgcagcctggtgcttgtcggcttgtgtttcaaagtcgggtataggtaaggtgaaacaagaggatgtggaggtaatatggtaaatcatggctcttcattaatctggttcgacttctttgtaatgttacgtgagaagtgttgaactagatataacatgcaaaactcctgttttcactttctactcaggccggaatccccaggcaacgtggatgtcaaatgtgacataacaaccagattgaatatccgcataagccctctgctccagctcatcaatctgccacatgtgcagcgcacctggcgaccctctagcagaatgaaggcgcgcccacgcgaacatagccctcatcccatttgcagtcaagcgggtgcgtgtatcatacacgcgatccgcagaaactgcctcagtgtggacctctactagaccagcattgcgcatctcggtagccagtcgattccagccaagcttgaagcggggtctcatggcagtcatgaacgtaaatcccattgcactcgcagcgtcagtcgtagaagtagcgcttccggggaagtggcgaacgttagtaaagtcgcactcttcccactgcatagcaccgccaggctttagcagcttagcaagattgcgcacagttctcccccattcagacgctgtcaagccggcggcaatcagtcgaatgtgcacgatatcatactgtccgtagaggttgacgggaacatccttgcgcgcgtcgagaacgtgaagagtcacgttattagggagggttctggcgggtggatagagcgatgttgatatgtcaaagccgtgtaagattgcgtcgggccagtcatgggcgaggtagcgcaggaaggctgcagtgccggtggcgatgtcagccactcgcgcatgggggtgcattttatctcgaacggacgggtgcagcaggtagccgatgtttctgtttcagcaggagtcagtaaggtttgattttgggctgatttgcaacataggacttggcggatttgcttactcggtgaggagggcgaactgctcatcgagtctacccagtcgatgttagtattaaatgttttattggtgctggtgagctcttaccgttgcgcttcggtggaatctcgctgcatattctccgcgtatggatccatgaaaagagacattttggacagcgtactttggatcaaacggaaggtcggtgtctcggaacgtacaaataaagggaggatgcaggacgctgcagcggactgatgggaagagtgagatctcgatgtgaccaggttactctaatctttgcctcagaaagactgaaatttggtcttttactgcagtcgccagggtcgcacctgctttcgcagctgaacctctgctgatccgcgcattgcaggaagttgaggtcaaggttatcacgttgtacgaaatgaactctgcggtattcatggacgttttccatatctgacatctctgtatatgctgtcctctagattcaaccctaacagattagttgaaatgatggtatctcttgagtttagaaaatgattcctctcgacacttctgctaacagcccataccgccgaacaactttgctttatattgtcaaatattgtcattaattataattctttcaaatatgatccacttgaatcatcgctctccggttctgattgtttggagtgtgatattcttcttcgttgctgcagtagctgttgtacttcgacttgcctccacacatattcgacgtcgggggttgaagattcatgattaccttattttcttctcactggtaggtttgactggggattaggctattcagccggctaaggataatgctaggtgctactgaccggctatgtggtggatatgttgattggtaagttgatccgatcgactcgctatgcagcaaaaagagctaagatcttatatcaggagctattacctctggctatggcgggcatacggctactatggctgtagtgcaacccgggagagttggttagcgcattgaaggtacctcgtctccttgaacgtttatatgaggtatcgacctggttagattttctgggcatcagaatggatgtgggcaacctcgacagtctgttttaggctcgccatactccttttatatctggagatcttcccgggcaatcagaagttcttctggagtgcaaccggggtgggatgtcttgtcttcctatactgggtatcatcggtattgaccatcgcgttgctctgtcgcccggtcgcctacaactgggatcgcaccatcccagggagctgtggggatattttgaagatacagtatgcatctgcagggttcaatatgggaattgatttgggagttgtgttgctgccgctccctattgtttggcggctgcaaatgtcgagtcgcaaaaagactggtgtcactgcttctttcgcgataggcatcctgtaagccccccacaagctcactcttattctgtttcagttgctgaccgctagtagaacggccggtatcaatctgggccgcattattcagaccaagttgtgtccagctgacgacctaatctactgcctcagagactcctctatttttatcatggcagaaatgacggcaggaatcttggtggcttgtgttccaacatttgggcccttattgtttcgcaggcgaaacacacatccagcgtaaccacgcgatttgcccacaattgggtcaattagaatccgccgtcggcctgcgaaattcgattctctcctttctactctcgatcgcagtcactatgacgaagaacgagaccatacaaaggaattggagtatgtgggtgcgcccacagcacatgctgggactgggactgagaatgaagccccagagactggcattttagtaacacacgacctcgatgtgcatagtctgaatgttctgcctcgagtatctgagacttcgactgtttgaggagcagcgattttctcagagtggatgttcaagatgcaagttcccttttcctaagagatctgcagacctgccgacgagaatatgctccgtaatgcatgtccgatttgtaccacccttagatgagtccgagccgtttgtactggccaatttgtgagagtaaacaaaaatacatagttgaaagataaaccaattggatcaagcttttcctcaactgggagagtatggtcgtgaatttttttcttttccatcaggcaccaacacctgggcacgatataagactgtgagaccacgtgcggggaaaactccttgactttcttttgccccaactctctctctttcacaactcaccatgccttgcaagtcctttgtggttgtgctctgccatggctcttaccatactcctgccccgtaccaagctcttgttgatgccttaactgcgaagggcatcgaggctcattgtccccaacggcccacttgtgatctcagtcagcttaatattggcaaccctagcaaccctgattttgatcgcagggctcccccaggaggctatccactccccgcagatgatgcgacagagatcgggctgctgctagacaagttgattgcacagggaaagtcggtgctacttgcaggacactcttccggtggctgggttgctgctgaggctgcacagtctcatcgccaagctcctgtccgcctaagggaaggaaagactggtggtgtcattggaatcttctttatcggggcatttattgttccccaaggccaatcagtgaactcattctttcaacccccgggcggtaaagttgttgtgcctccgtttatgcaatttcatgtcggttgaccagtgaatgaatctttgtttgtaagtactgaccgttagtatagaaacacggtgtcaatggtcttggcaccatggtcgaccctgaagaatacctcttcaacgacctcgatagtgccactgcaaagaagtgggcatccacgttgacagcagctcctgtgatgaacagtccccttacccacaatccttatgacgtgctcccatgcgcctatgttgtgttagaaaaggaccgtacattaccaaaggagtaccaagaaggaatggcggcgagtcagagcaagccgttcacgatctaccatgcaccctgtggtcactcaccacacataagttggacaaatgagctcgctgcgaagatggaggaatttggaaaccaggttctagctgaaagaagcacgacagattaagtgaatttcagaaataaatctttcttgaaaatatacaaaagaggaaacatatgagttacactcgaatcccaaggtttgacgaataggaaggtcaagatatttgtgcaacgcgcgcgtcttcgctttctaatgcctttccactttctcgtttcttcctctctccgacgttgtcaactacttccccatctctctatccatccagccatggatacccctcgctatgtgttcggcgcacaaggattcggtgtcgcctggacagttgacaatgttgaccacttgatgaaaagcctcgcggaggctggaatccatcaattcgacaccgccgccttgtatcccgctaccaatcctggtgaatctgaggagctgctgggtaaaaagaagccagagaatgcagtcatcgacacaaagattctcttcatgggcgatgactctttgtccttcaacaacatgggagcctcgatcgaagccagtttggagcgactgcagatcaagcaggtgggtaaaaggcgcccacttactttgtgtgcaatgctaatacggctattactagattcacaccatctacgctcatgccccagaccgcaagaccccgatcccgcttcaggctgcttacttcgaccattactatcgtaagggctactttcagagattgggtctttcgaactacagtccgtccgcaatccgtgcctggatggaaatcgcggtagaggaaaacttcattatgccttccgtctatcaaggccagtacaacgtgttctgccgaggctacgaggatgaaatttttcccgtacttcgcgagttcggcattgccttcgaagcaacctcgccgttggcaggtggattcctcaccgggaagctttcctattgcccttcacccgaagagttagagggtacccgtttcgaggtcggtgagggcaacatgctcggtgcagtctaccgtatgtggtatgaccagcccgtctatcaccaagcgatgcgacgattggacaagattggtaaacggctaggaaccaccggggcccaatgcgccctgcgttggttgcttttccactccaacctgaaggatcccgaccgaattgtcatcggaccaagcaccttgaaccagcttcaagactatgtggacgcccagaaggccggaccacttccagctgacgcagcggccgagatcaatgcgctttggccggccctcaaggaagttgcggcgacgatcatcgagaagggatggtggtctctgtgattgatatgttgaacttgagggggataacgaccaaatttccaatggatcacgaggtattcatacgccgccaggctggtctacaaacatcttatcaagttaagccttatgctcacagacacatacaaactacatgcaatggtatctcctagtttttcacacgtattgctcctatgatatcattccctctggtaatttaagacctacacaatcgcccattctcacccaatctccaagcctcactacccacagccttaaaagcgtagaacctattgtgaggatcatactttctcttgatctctagtaaactgtcatagttgtctccataaaatgcatgttgccaatccctttggtttggatctgcttcgttcaaatatgcaccacttccaggtgtcaggtcttctagcggtggcataaaaatatcggtaatgagctggtgacgagcgacattgctctcccagtcagtgtagtcgaacagcctggattgagattaacaaagacttgccctaaccctgaaagggaatgggaatgaattgcatacgctccaattacgacattcatcaacgcatctcgccaggttgggttgacactgttgtcgggatatgcaactcgagatgagttgaccataactcctgaaatgagaaccccggcgtttctttcgacaacattacggaatgtgttgacaagctcgcccaggttctgctcgactacagatcttggaatcaggcggccaccagcaagttgatcagttatgttgtctggtgggctcatcatctggtaggcgtcgtaatatgtcgggaaaccgttcacatagtatgctgttcatgctctgtcagtgttcgctccaactctgtatcgccttgtacttactgtgctgtatgttcttttgttcgaggaatgaaatcaaaggtctaaaaagggaattgaaaattgtcgctgatctgcccggaatggtagtaggcgtcattgacaatgtagtgttcattaaccaccaaacacttgcacccccagcatcccggaccgagggaagaatcgaaataaacatggcgacggctgcaaagaatgtatctcgcgatacacccttgtcggagaatgaaaggttacctgacgctgtcggcagttcagggtaggccttgctcgtcatcgacacaacaacaccattcgtccctccacctccgccggacagtgcccagtagagatccgaatagtgtgttggggatgcggtcactagcttcccatttgcaagaacaacctcccattccaggacttgatccgcggcgagtcccacatgggacaccaattggccatggccgccgccttgcgaatatcctccagccagcccaacggttggacagttcccgccgacgataacaagcccagctttataagcggcgtcgctggcttcgaaggattggaccccggctcccatcttcatagctttaccggaatattgtgacgagacgtaatctacgatggaaatatccttcatgtgatgcatccagatcgccagtcctccagctccagtggacttcccaagtaggtcatgtcctgtattacggatgacaaggcggatgttgtgacgagcagcaaaattaattgtcctctggacatttgcgggatctgtcacgttcacggcgtactcaacgtagttcccgatcgcgcaaggtgaagattttgacgagaagggattgcagcttaatttcgtgaatctggacgccataattgacgaggaactttcgtaatgcgttgctgggaatccccaattggactggatttgagcgcattgcgattggttgtacggggtgaacgaggcgatgtgacagacgctggcgattgggactgtcataattaacttgttgtccactgttctgttgaatcgtgttcatcgatgatcctcaggccagcagggatcgtgtggcatgcaacgacaggcaagggaacttgtgtgattcccgattgaaagaccacaagccacagttgcggcacgaaggacagctaggcagagccgcatacatgcaagagaagggttggccattgtgataatcggacttcggctaacttaatgtcactcgagtagcagattatatacaaagacatattctgcaaagcggaaaccagcctgtacgcactacatgtaagactttgatatacaccgaaaatatcacatcacttcggccctgcataggtagctgtgactgcaagtctgactctgagcctcgtgaggtagggcattagttgaaattccacggaacaaaacacttgctcatcttatatatgtcttgtctaagattggtgtaaccaggtatgtgcggagagagtgctaattttatcacgataaactcgaaaaattgggggctggcttattatctttgcatagtcaagtttactgcagcctcttgcgacctataccagcctttgcattgagttgtttgtcgatgaagtaaagggctatagatagatcagctcacttcggtgaaacacaagagataataagcgcttagtacagctattgaacgtagaaggactctattgaactgacactagaatctgaccatagaatgaatgtgaatgtgagatgagtgaaaggctcagggatgaatcctaatacgaaagatactattcatgttcgttgaccagggatatatatcactgtacgaagtacacgagcttgcaaaccccggatggtgcttttttttggagtgtttacacctgcgaatattaccataaaatatgtccattgcctacctttaggtcgttaactattggatgttgtagaaggctggaaaaaaaggtataccccgtgatctggcataaccacagctcgatcacgatgccaagccacgagtggccgataatcggccgcacacccgagcctaacgcacgtcacctcttctaggcgccatgggatcctcgtactctacaatatcggaggatgtcaaatctatccgaaatggaccttcagcctcccatgaagaaaaccaaatctattacccaagacactcagctgatgcggtcgagagcttcaacattctccgacaaaagttgccgtctgaactcgtcctggagattctagaattggcagagtattgggtgttatctgccaccttcagagcagacacagtgggttacgatgaaggcgactgccgtgatcgaaccccatatttgacatcggagcccatccaaggcgagcgatttcccgttcgagagatcagaatcaacatctggagccatgatcagggatggagcagctatggtgaagatcatggcacatacagaaactcttggacctggttcgatcttggtattgaacgaccgccgggacgagatgatatctccaaagatgaagacctacgcctggcgacgaatgttcacgctagacgcgaaactatgcaccaccagattacgtaccggagggaccagaaattacgctggatgcaaaatcttcaagcaggtgatcggatttcgattataccacgggcgcgttttcatggctggcgcaataccgtggaaaaggcttctattgaggtttacaccagccctgttctgtgactatgtccctgcattatttcatattcgtcttgatttcaaagccattttgtatggtctactttatacataagtgaatgtgctcaactttcttcgatctttctgacatctatcgatgcgttcccgaagacagaatagcggccacttcctcataaacagaaaatacgatgccaccactcagaagtagccggcccaatcgcatggaactacccttccaaaatccccgaagcccatagtcccgaatcacgctccgggaggcttcaacaatgccagctccttcgacaccctgtgcacgtgtcttgatggtatcaaatggttgtgtagcgtacacagtaactattcctgccaaggcaccgatgccgaacgttgtgaacacatttggcttgatgcccttagccttcgtggcttctttgagcacgttatacgttcccatacgaactgcagaagtggccgattgcttcatcatcgtcgacacgagaccgcgataaagctcggtgataccatgcctttttaccagcacttgtattgcctgtatgctcgacttgaattgccgagcgccttttgcatcgtcgattctggggcgggatcggtcagctgaagctcttttaacatacaagtggataccaacaatgccgtcttgatcctctccgtcggtgttactgctagtacactctctacagcgccagcggtcattccagcgagcatcccccggccagccgagagaacgccacgatcatctgcaagagagttgcggattgtatcgtaggatacgaaccggaccgcggcctttgctgttgttccctacaaaatgtcattaatgtgacgtaaaatgccattggagacgaataaaccgacgatgacaagagttgagcatcctgtgtacagagcaccgacaccttcctgtctcgcaacttgtacgatgagacggagtggatttgatgtccgaataggaccgtcattcgacagttgaacacgtgtttttgaatactcaaatggatactgcggccgtcagttattgaactcttgtgtaaatcaagaaaccgaccgttatggccgcttccactccaccggcaattcctccggccacgagggacacccactggggcgtgtaaagctagactaggtcagttaaagtactcaattgacgctcaactgaatgaattaccctcgtctgttgtgggccaggttctgatttatcgggcgcagacatggtatgacagtgacagcttgcagcttacaccggttgaataataaggggtttggcccaatgggttggagatattctgtgggggaaaacgggatgattccccggtatgcggggacgaacggaagaagagttgccgacatattgcttgctgtcaactgtccagaatatttcttcatggtattggcaaattctatctacacataagttctgcagggacaaatagaaccccgggcttgctgtataccacttcagacgcctcgctctcgaatgcagctctcgagatagccggcacataagtgtcttcttcctgtgccttgaagcttccttgtcagggcaacgccgggatgaactcgagctcgaatccctgtatgctaggaattgtgagcggtcgcggcggacgtgatgacctttatgttaccggcatcgcatgatggcggcgattgatgtggcaggcctggcactagaggaaggaggaaggaggaaggagtaaaagttcggcaatatgtcgcaaaaacgcaacaataatgcattaccatccactctcaccgatcatacgaccaagccgcagggaccgatggaaaaaatgcatgcttcatgtcctgaaacgcagctacatcctcgttcattatcacggaaaaattaatcgcagagccagcgtcagggtcgacggggagccaatttgatgtcatgcgggtactcccatctggcatctcgagtggtgtgagacactcttcttctattcttgagtgttgatggcgcggggagctgagactgtgcgtttgtccatgagcctggtatggagattctaatgccgaggtcgcgaaacccggcccgaaatcgaattgcatgtattggaaatcttcgtagtcgacttcaccttcccacccgcttgatgaagcatggcttggttctggggacgcgtgaggatctgagtttggagatccagggaagaaggcgagggtctttggggagggagtcatgaagagcgctctttgtgttgcgagctgtaaatctggacggggatggatacgggggtttggggtggtttgggatgattggcgtgagaaactagtatgattgttagctagctagttcaagatacgcgtcttttcttcttcttttgtctcgccagcaaggcactggtagtaatttaccttttgacattgtttttcgttcctccacaatcctctctcactagaccggcgtcataccatgtttgcggatatggttggaatgcggtcgatttgaccgggtattcatccacccagcttaactgctcaatagcccgggagggatctagtccctcctgcatcgtcagaggaaagtcgctggcgataaagggatgcagaccgagctcatcgtgctgtcccacatgcaaatcaatgagactctccataggccaggaggtagtctcgtatggaaactgagcttcggtcatggtgaacgtgctttatttaccacaggttcaaatgacgatgggggcaaatatagtaggcaagacacagatcaaagagaaaagatctggttggagttggagttaaagttgaagcttgaaatagtttctatctctgtatgaccttgctaccagcgcaaagagaaaagcaaagaatgattactcgcaaaaccgggggcatcctgtacctatttaaaccaaaagaaaatcgaattcaacatcaaatcacggagctggggagctgtggaaatgcggagttgcggagaatctggggcagctccagcggcaaatatattcctagagaccgcatgatcccatgagatccttcaattaaccgatttccccggattttacggtcaaggccgtgcattcgtgggaggttgttgtccaatcggtcaattctggtacctcggcatcgagaatttaatcgaaaccccgccgttgagcggataaattgaagaggctcgaggcttcaggaacccaaataagaacggggaatgacatcgccttgtttcgtacttactatgtaggtataaccggtttaatatagggttcggaggaagatattgtccacaccacattggaagaatggaccgagataccctcaacggtaataaattatatacctccagatttatccgcccttaattgttacatagaaagaagcttccaccgaggaaacgccagatatccaaaaacgccactccagaactatacaatgcgtagaaaagtagtatccagtcaaccccaagattgcgtacaacatagatcgaccgtggggaaaggggttcccactcctccgctcaggtaggcaaacccacatcgggacgcgtgctttatcctgcagggcgcagggatcgacaggaacagagaaatcctagccgggcggcttgtggggtatttacagggccaggccagtcccttttcgcgtccagcgataaagcgcgagaactgcttttcggcgatgtcgaatttcactcgggttaacaggtcgacctcgagcctgggcaaccgcagagcgcatcacttgccggaagctgcgttggtactccgtgttgagggtcaccacacaagattctgtcgctcggatcatggtctcgcacgcgttgagtatgccctcgcctgcttccttttggaggcgctctacgataagtagcaggaggaaactaccctgcagcagctggatgccgaagaagtaaggcatgaaactaacgtcggggtcgaagcggaggatttgttgcacggaatcggccgcttccagtgcgtgtgagatggtcgacgcaaaagccggggaggatgtccagaaatctttatcttctatcaatgagacaggatcccactttccgacgagcaggatgtggaggacgtgtgtaaggtaggaggaataggcaatcacggtctgggtatgccaagaataggcctcggacaattgcggatcgacaggttctggtttgttggtgtaagcagtcgttgacgaggccgctgggtctgccgccgccgccgcgaaggttgtgagactagctttgtatatctcaagctggcgcagcacttccgatacgtgaacctcccacgcttcctttccttgaagcctgacaccgagagtagggtggtttcgtgcctggtttagatcgatcagttcgccagtgatcgtcatgagtgggaggaaaaagccaagaatggagtggtcgtggcaaataaagttggggaaaatgcgacgtttattttggtcgcccgaccggaggcattggggcccatcgggacgaggactattgctgtgaatgattcctgcttgccaggagctttcatccagtggaagcaacaggtcctcgctctcggcatccagtagggctagcggacgattatagcataatgcaagatggcggtccatgatatatagcaaccaccaggttctgcgccgctcctcacgatgctcttctgtaataggaacattatgtaaatcatgttttctgtcacatacacaattcagatttgggcgtgaaggattagagtagtccaagcccagcccacctggagaaccaggccatccacctagaccgtagccgaaggacggacttgaaccatcgctcatgctgtcgatattgggtgttatttccatctcttgattcaatttaagttctcgagctagtgtaaaggccgcatgccacctagtttggagttagtggagtggacaaaagataagagcaggtgtacaacgaaccatctcatacttgctgccttctgttcactagatgagataatcgaggccacatgaatataggtaatgacatcgtctaaagatccagcggggcctaccagccctttatcatcaccgactccttcgaatgggtggtgagtccctgcagagaagtcgtgggtggttgtgttttcggcgggtgatgaatcttggtctttgaatgagacatgtatcaaaggccgcagtaagcgaataatcaacgcacagagaaattggcatatctttctccgttgtaatggtgagatggataaagagaaagctcgatcatccacagcagctacccagagcatacttgccagcaaggcaggactagtgggcctggggcggtcgacacttagaaaagacgtctttcgcaggacatagcaatgaatatgatgacacacaggatgcatatgggttgagaaagcactagtaaagtagagttcaagcagatcgcacaccagtcgacgcgggaggtgcgattcgagaaaaggcatgagaggttccaaaacagggtacttcaatggcgaccgggagattgatgaccgtcttcgtcttgaagggttcgtccccgacacagacggtaggggaggggcgtgctgggccgcctggtggccagcgaaatcaaccggattccaaatatccatcaaccggggcaaaggcgcgtcgctgccacccgttcctgcaagcatatcgtacgagtctggcgacagatgtgccgctgaaagccattcctctgtgacattcgcggcaggccctgtccgctgcggctgtggacaatctggcatagaccgagggtcgtcgacaccggcgctgatctcatttgttgcaggcgatggctgatgaaaggtcgatgtgggagaattgttttcaattggcgacagcctctgctgcgactgcgactgcgacttcgactcccgcttgtgttccccgtcggcctgcttcccctcggcgcggtcctgggttacctcgtcctcggcattcgtatttccatttgtcggcttcgatctcgcaatacgtcctcgtttccggcgctcgcgggtaaattgacagtgtatatcaccgcgaagacacctcgagcaggggaaagcacgatcgcatcgtacgcggcgagtatggcatgagtcgcaggcgactctgtttcggcgccatcgtcgcttgccattcggtagctcaacctcgaccgagtcaggggccggagacggctgatcaccctgggactccatttcgggacgtcattggcgaggttgagtgttgaaaaaaaaaaggaagccgaagagaaaagaagaatgttgcggggaaaaggcatcgggcaattggacttggcaatttctccaactcatttagttctacggagtactccatcggaggaacgttgatcataatacgcttcattcttatttacatattcactattcacttcaccctttctggagtacactcttgaatcgcttcaacgctcgatctcgactctctgcatggtccacaatgggcttggggtagccgttcttctgcgcaatagccgcggctcccctcgcatatggttcatggatggctttaccagacacatcgcgcagctctggcacccagtggcggatatactctccctccgggtcgaagcgctcactctgccgaagaggattgaagattcggaaatatggttgcggatccacgccagtactggacccgaacccccacccgccgtgattggacgcgaagtcgccgtcgattagattctccataaagtagcgctccccacggcgccaatcgagcattaagtccttggtaaggaacgatgagacaaccatgcgcgtgcggttgtgcatccaggcgcagtggcggagctggcgcattgctgcgtcgacgatcggaaaacctgtcttgccatcgcaccacgcttggaactgatccttatcgtactcccattcaatatcggtatgttcgggcttgaagcatttgttcatactacaggaagtctttgcattagaatgggaaacccgttggcctaggagataacttaccagatgaagggccagttcaccaggacatgtttgtagaagtcccgccaggccaactcgctgatccacgtcatgtaaccgggatcgtatcgatcgagatggcctttgttgaccctcttcgctgtcgcgacagcagtccttacgctcagcgctccgcatgcaatgtaaggactcaacaccgaagtgtgctcaccgggcaacatgctccgcaactcctcgtactttctacctttctcctcgagaaatttgtccagccgccggagggcttcatgctctccggctgggtaaagtccctcaaagcgtttctggtcttcgcccgacaaggtatgggttttaggtgcggctggcaccttgcaattgaataaatccttcaattgatggcgcgcgttgcctggatttgacccgggctcctcagagacctcgaggtaatccgggttctctttcaagaaggccaaccaggagcgataccatggagtgtaaacggaatattgtttcccttgctggctagccagcgcgcccggagtgaccacacatgtgtcatgagtgggagcgaaattaatatcattatccgcgcaaagtctaacaagcttagcttcgcgtcgcagttcatctacctcatactcgatattcgcatataggttcttcgcaccccactgttgacacaattccacaatccgtttcgggattgccttccgtttctcttgtgtttccatgtgcagagggatatccaactcccccaggtcctgttgcaatcgctcgagggtgcgcagcgtgaaatccacccgagcagggctagtcaaatgggcagtccaatcttcgggggagacgatgtaaaggccgatcaacgggatctggttttctttcgcagtttggtaggcagtgtacagtgacctattatcatgcagtcggagatcgctcttgaaccaatgtaccacggcattacccacgttgatcgactggcgcttggtggcggtttctcggcaagccctctgtagcgtttcaatagggcgttccagctcgccatcggtgtatgctcggcagcgctcattgctcatctcggccggatagaactggcgtaggactatgccgaaatcctcggtttggttcgcgttcgggtgcggttggtgcaagtctggtcggccttttttgctagcactcaagccatcatgcttttcagctgccggttcggtagctttcctcttcggtggcatggctgaaaggttgcgaacaagctcggctcgcaattgactgaacagaaacaggcgcgggattgatctagaacagcagagaggcagtttctgcattactgagaataacaaggacaaggggtgctaaaaggtatcccaagtccttcgatccagatcgggatcggcttcagatctgggtgacgtcagtatccgatctgatcgcgatcgcgtccctgtctacggtctggacctgttggacgcattccttggtcggaccatgctagttctgggattccgattcatttcagttatgccacggagtagtgacctcagtccccgtttcttgccaatggccaatttgggtatacggcagatctggcgttgaccaatcccgcgaatgtgaacaggctcttgttctggtaccaattccccacaacgactgcaattaaccaggaagtacttatatttcatacttgtcatctccgagggctcatattccatgtcttccttcgttgacaaccttgtcaactacctggccaataagtacaccaaacctcaaaacaagggggatcgacagtcgagaacaaaaatccagccaccgttcaataatgcgatgatggaggcgtaacaaagggagtccatccctgttgatatgtacttctggagtcagctctaagtataccccaaacttccggtccatggcctcggaacttctcgaccagtctgctttcgtcaatttccccacaaccccggctgtcaggtgctcttgtatgatccgattgcctccattcgccgccgataccgtcaaagttctccccgccactgttcagaccctgaactttaaggtcgctgggaacaaatttaatagtttattcctatcccctaactcttcccatcttcaattcccccctatatctatatctatacctatatctcatccctccttccctaatccatctaccccagtgcacaaccagcaatgtccctcaaccgccaatggccacaaacgacgcccgcagcgttgaagactaccttattcccggcaacggcccatccgacctagctcgcacaggcgtcttcgccgccttcgccgcactagcctggtacaactccatcgagctcgtcatcctctgctttttctccttcagacgctggaagggcatctacttctggagtcttctaatctcctccggctgcattatcccgtacaccctggggtacgtccttctcttcttccggaccggcgttaccccctggctatgcgtgaccctcgtccagctgggctggtacggcatgatcaccggccagtcggtcgtgttatggtcccgcctgcatctcgtgctgcagaataggagactgctccgcggtgtgctatggatgatctgcattgacgctgtcatttttcacatcccgactacggttctcttgtacgggactgttgctcagccggcgagtcactgggcccgcgcgtataatatcatggagcgagtgcagctggtcggtttctgtgtgcaggaattgattatctctagcatctacgtctgggaaacgattaagctgcttcatctcaggcctgaaggtcgccctcatggcattctgaaccagttgctggttatcaatatcctcattcttctcttggatatctcggtcgtcgtcattgaatatgtcggctactatgctatacaggtcatgttcaaacctgtcgcttacagtatcaagttgaaacttgaatatgctattcttggtaaattgatcgcggttgctcgtggtggcggctccgatagtcaggagatgcactccagtacgcgggagatcaccgagtctagctcgtttccgtcgaatggggatcggcctgcgaaccgggagacgccgatgcgtgttcgtcgcgagtacagtccatcgtggtttgggggaggaagctctggtcattctacatctagtttatctggtgtcctgcagaatccatgacagcaggttttagctcttggcttgcttgtacctaatcacatagatgttgagaagctctatctctttacaggtgatatagcatgtctcaaatgttcatacgagaaattaattgtcgaaaatatgcgaaaatattcacaatggctccaagcgatatctcaaatatattcaacgatagtaatcagccaatccagcggtacccgcctgcagcaccaatacgctgccataaatcttattctcgggctgtaccatcgccgtaccgacaggtcccagaacccggcgggtatcatgtccaatactatcctccgaaagacccagctcaatattagaagagacactacgacgaccaacgataataatgttgttcgccttgttcgaagtgtggttaagttcttcacgcacagaaacgacagccatttgagctgcgtcggtaatggtatcattgacagctggttggtggaagacgacacgctcttgaagttcttctggaacagaatcacgcattgtttcaaaaaagaccatatcggactgagagctggacgcagggatcgcactcgagctcgaagcagatactgtagtcaccacggctgttttagtgacatcgcctcccaatcctccaatctgaataacagtcgcagtgacctgatcattctgagcgagctgcatgaccatccgaagagcgaagcggtcatcatcaccgccaaagaatggaaggacaatgtggtgggagcggctgccggttggctggcgggcgaaaattgagccctggagactcatagcgctggcggtacgtgagatcacggggcgctttgatgaggcagaggatggactgtattcaattaggatgcccacatggccggggacccgctctaatatatcagaaacgaagcttgtgtaggtgccgttggagaaacgatttgcgtcgtcgatgtctagcccattatggcggtcggccagtgttccggtctcgctccaggggagaaggagcagatctgcggtgtcctgctgcgccatgccgatgacggtgtctgcgtaagagtgctcggggacgacagatacaccagccatgagcgagagatcgtgccagtctccgaaggcgcggaaagtgttgactaccggatcccacagtgcatgctcgcccgcagcagcaaccttcatgacactggaatcacggtcggtcaattccatcagcctaacaccgtgcaccttaagtgtggtgttttcgtcctcttcttgggtaataggatcttcgacggtttcctcggtctgttttggcatctttgaggggtgaatgcgtgatgacacggatgcacgtcgctttgaactgaggagggctgctatagtacagacacccgaaagaccatcgagacgaaggtagacgaggagcttacgtactgggacggtcttcaactgatccttggcaagggcgacgctgtcgttgcggccatcatgctggatagggttgccttcccagtcgatctccccgcgtctccaccggtcgaccttgacctggtaccatcttggatacagcaaggtggttaatggagtggtaaggaatgtggtgaccaaggccatcacgacgaaaattgtaaacgtgcgagtgctcaaaatcttagcttggagaccaatgttctggggttactgaattagcatccattctcaatcggaaaactccctgcaggttgtactcactagcacgattaattccaccaaacccttgcaactcattaacacaccgatcgaaaagctttcgcgccataaaaggccacagagccgcgatgcaatggcacctccagtgactttcgcaatgaacgcgatggcgattacgccaaccacataaccccagacgattccagagtcaagaaggcccagattggtgctcagaccggacaaggtgaaataaagtggcaggaaaatgacagcgaccaaatcctcgactttctcagtgagcttgatggcaaagccgccttcgtgtgggcagatcagaccgatgacgaagcctccaaaaatggcgtgaacaccaataatctgtgtgaagaaggctgaagccagagcaataagcagagtgagggccaccactgactggctgggtcccttttggagactgcccgttttctcgaggaagcggaggaacagtgggcggaaagcgaaagtcaaaaacaacatgtaggcaacgcagactagtaacacgtacagagccgtgattccactgcccgcgttgacaagagcaacacatagtgcaagcaggatccagcccaccacatcattaccaacgccagcggacagcacgatcacaccgacccgggttgagagcagcttcagctcggtgaggatacgacacagcacggggaaggccgtgatggccatggcgataccgatgaacagcagataggtaccgaaggcaatgggcttggtaccaggatcatcgtggaactcatggtagaggccatatgaaatggcacaacccaagccgaatggcaagatcatgcccgcagcggacacgctcaaagcgacccgccaattactgaccaggaagcgaagatcggtctcgacaccgaccaagaagaggaagagtataagccccagattggcgactacattgaggctgggaatgctggcggtcgggaaaatcgcgtcggtgaatccggggatgcgacccatcaccgatgggcccagaacaattcccccgatcacctctgcgatcactcgaggctggcgaatctttgagaggggccagtgtataaggcgacatagcacgatgattatgacggcctgcttgtcagttatatttctgtttccccggatggcgacatagttacctggataataaataacaccagtggattcttggagtcataatgggttgggttgccgccttcgaggatgccaccctgcggactgactgcgttagtgctattggccgtagctgtcgtggtcacgttcgcggtcgccatactggatgatatccagcttcggcagagagaacaggcagaggagatcttttaagtcacgacgtctccccagcccaagacaaatgaaagagtcagcctacgctaagaccggggccaataagatttaaagtgccatggatccttaacggcttggcctcgctagtcccaacgtggattggtcgaaagttcgaattattcattcaatgcgggaatcacgtttctcttcttgaggggaacaaagcaaatatcactgcatgcggccgaggaatgggcagtctcgacggagtacattctttttttgctgtgcacgaacacgaccagccctgaaataagaaagagttttcataatctgcgcttttgtttaaagttttcacgtggtgatggtgacatgacagctcgggcctttggcgaggcaggtgatctaccccggattctttccccagacacaacatccacagcatcttacggtctatgcatcttggtaatgtgacatctgattctacaaggtttttctgataaaactcgtagcttgttggcatgtcctcttgaatcatatgtctttgtccatgtgatggagcacgatatacatgtactatatatagtgggtttgaggtcggaggtcattaaccccttgagttcaatctcgtgtatattgtaattaatacatttttggcctgtaagattaagtactctcattacagcgcttccaatatatattccaatgatctatcaacatgaagctattcagagattacctggtcaccatgagttaatttaaatcgattcaaccaacaataataaagataaattaagtctaagaacgacttttaaatgccagctagtagagagtgtctaattaatcaaatgcgccggtatttaatgctagttgtggctcaattgtacaaaggcttcagattaaaggtctcatagagaccaaacccaatgaaacaccaagcaaaatgcaaaacctcctgataccatctaggaactgaaccaatcaagccttcttcgtcttggccttggaggtccgcactctgaagaggtaatagagcgtaatagcagcaaaaatattgaaaaagaaataacaccagaagatcccgtagtttcgccagcgatgaacccactcaatcttcctcgcagcaaggtactgatccgccgaactgagagaacagtactcacagccagacgtagcattgtaattggcaagtgtcccggctgcagtttcgaggtacttctccatatactggaagcaggtctgaccagaaggcggatcaaagacactcatctccgcagcattgcactccaccgggcggccatggagcgctgtagcgctgataccgccgatgtagtaggtaaatggtgagacgcgatacatgaagatccagaagcggggcagatcatcgggcggctgcatcacgccgttgaagatgaaggaaagaccgaacatcagcgtggcgaccatagctgcgagtgcaggctcggggattgcgcagacgaccagctgtgccatgcttgcggcgtagatgtagaattggacgataaatagcatgatcagtgcgcggcgctcggagtcctggtcggcgccgaagacgcaccagtagaagcaggcccaggagcagacgccgaggcaaacttggaaggggatttcgacgaacatctgggagaggatgaagactttccaggagtagatgcgggatgggcgttcgcgaacttcgtagagggaacgttggacgacgaacttgggcatgatctggttgacaagtgtgttgaaaattgtgcacagaaggaaaatactgaagagcacgttttggaagccttgttgggtgttgtctgatttccagaacgagaagccgatgaataatccagacacaatacccaagataaatttggagtagacgtattctggctgacggtagtactgctggaagactcgttcaagaacataatacagctggcttctgagtggcatggcgaactcggagttgtcgtcgtcaaattcgtcaggcccgtccaatgaaggtcgataagaagactgtttgggatcattatgaagtcgttcgacctcagcctgtacctcttcatactccgggctcttgttccaggccgcaacccagtcgattgggcaagaatctccagcaaccatttccaagatgtattccgcgggattttcgagttcctcgcacggtcgggcgccgttgttctcgaagtaattcaaaagggtggaagactgatttccgatgtcgccaaagtagacggtctttccccccttcgcaaggaagagcaaacgatcgaaggtttggaacaactgcgcgctaggctggtggatcgtcgcgaggacagcctggccgtgatctgcaagtcttcggagaaattgacaaatagtccaagagctttgagagtccagaccgctggtaggttcgtcgaggaagataagcagggtaggtttcgcagcaagttcaacaccaatgctaagcagcttcctttgctcgacgttgaggccctctcccaggcttcccaccaccgcttcggcgaaatcttccatgccaaggactttgatgacttgttcgacgtactcatacttctcatgcttggtaaccttctggggctgacgaagcatagcactgaaacgcaaagcttccctcacagtggtggtatcaagatgaagatcttgttgttgcacatatccagtccgacgggggaagtttgccgcaagggtcttgccgttcacgaatatatcaccagagacaacaccgatagagactctctgcgcaaggacatcaagaagcgttgtctttccagctccagaaacacccatcaaggcagtcaggctaccaggcttgacccagccattgacgttgtccaagagtcgtcgggtgccctccttcacggggatatcgtagttgagggagttccatgacagaatgtccttttgctcgggtaaacggatggtatcattggtcatctggagctcgagcttattgacctcctggattccaagctcgatgctgtgaccttcctgcagatacttgggcgcatgtccagggcggaaaaccagcgcctcagcctttgacttgtcatcagtaaggtactctgtcgcaaccaagtaaagtgtattgagggcgataaaaaagccgatgagaattccgtagttccgccacaaatgagagtgcttgtactcgtagtttgcttcaatgaaagcatccccagatacagttcgttgaccggcgactgcaccgacagtggagcagataaaggacgtcccagttccataactcgggatgaatgcggaacagtcaaatgttcgaccatggaattcattggccacgagcgcttcgaatgtatagtagatcgggctgatccaccggatccacgaaagccaaggatgcatatatggctgtgggagagtaaatccggtatagacgacaatgcagagcacaagcacaccggcaatcgccatggcctgcccaacagatttggtcaaggcaccgacactgcggaacaagccagacatggccagaactgcagtgagcaagaataggtagtggatgaagaaagctcccgcttcacggcgcaggtttgccataaagtagaggaccactgtgaagattgagattcgtatgatcttgatcggtaaatcgatgatgagactggctagtgcttcagtgaacgggtggacaaatgcatacccagcttgcttttcgacaacggggcgctgggcatagagttggaggatttcgttgatcgtaagaatggcattcatgagcacagcaaagtacatcactgcacccttttgaaagaagaaattgggggtatcaggagtattgtagaagatggatccaatgatcagagatagaatgatctgaacaataaccggtgccatggctgttggaagatcttgaagcattcgctggtaggctctgtgtatgcacagccgtacctgcatagggatggagagaagaaaagggctacgagctcgagtgtggcgagcttgctgctctttgtggctttccatgagtcttttcttttcgtcgacatttgggtgatgttcacgttcgaattcggaaatttccttgtgtaagagctggtactccgggctatttttccaatactcggaaaactccttcgctgtgcgggggaccttgccttccatgccaggccgtgccgtgcgttctgctgggttggtgattgcagtcaaaaagtcaccactgacttggcgctcaagtctctgccatcccatgtcttggaaataggaaactgcacgctctctgggtccataatagatctggtatccttcgtatagaagaaccaccttgtcgaaaagatcatacatcgactgtgatgcttggtaggcggcaatggcatggcaggattgccccatatcagccgaaaggcgcaatgatctcacgaatttcagggcagatgcggcatctagaccacgggtgctgttgtcccatgctccgatgcgacagcgagacaagaacatctcggcaatactgactcgctttctctcgcctccgctgacacctcgtacaaaattgttgcccaccttggtgttgtagacgtgggacaatccaaagacggacaggacaacctgagtgattgtctcaacgtattcattgcgggtcacacccttcaggcgttgttggggtgcacgagcatgggcggcgaatgtgagggtctgacctacggtcaagtggggaaaatgtaggtcgacctccttgttgtatgcgacatctcctcggtgatgtttgatcatatcttcaaatgcgattcctttgtaatggattgaactttcaggccccacggtcaaacccccaaggtgtccgcagatagtcttcaggaatgtcgtacatccacttccaggtcgacccagtacaagaaggagctctcctccctggagtaagccatcgaagttgcggagaatttgtcttggtggtgaggtatgcccagtcaaagctctggttgcagctcggaaggggactctcaaactggaagtgagggtttcctggtattgtagagcggagccagagccatgtatggatagattggagaataccacgccttgattgaggatatcgatgcctgaatcgttgacctgctccagtaccatttgcgcccatcggcgatgatcgaatcggggattggtgggatcgaggtatggggggataccttcttttgtgctggccgatcttgaaagctgttggccgattttgctagaggcaatgcgagtcaaggtctgttgttctcgctcctctagtatagttccagtgcgttccgtgattggagcgaactcgggatcaccatagtcctccatggcgaggaatggaccaatgtgtatgtttgtgtataattttgagctcctgggagcatcgggcatgcccaacccttttaatcaaatcatctcatcggtaaacggacaacgaagccaccgaagtatccatatttatttcatcgggttggaggctttccgatgtataacggagggacggactccgtttcaccgaaagcttctactattctagttattctagtggagctcaggtatacccatagcctataggtacctgcctattattagtattgagaagttttctcgtctgatcgatgattctcattgaaaagagatacggcagaaatataaaaaagccggtttggttgcatcatactgcattgcatgcctgtcaaatatctacaagtcacctgcgcctccgttcagaatctcattattattatactccgagctccgtacggagtacacggatagatattatcttcaaatactccaattcaggttttgaaacggtttacgacgacaataattgagtctgagtggagcctcgctgaatatccatcccgaccccgagcgtaaaggaggtatcggcgattaggggtgtcccttatctccatggtctttttgtagtgtttgcaatgtttgcagtgtttgtagtgtttgtagtgtctgtcatgcttgcatcttggcttgtagccttaatcctcagacatcatttcgtcacccagcgctagactagatcgttgcttgatatgaataagaatctacttgtttaaaatggacaattacttacctccctgactatcgagtgcaatcaagtattctggagttgccaatgcttattttatatcagtgctaaaactcttttgatgactattcttcataatcacccagtccgcgaatgactggtaggtcactgtatgattgcatctgttgactgcgtccaaaggccgtcactagacacactttcagtctgcctgggacctcatgcttcgagaatttctgatacatctctgcgatgttctcgaattcgtccacatacgtgaacatccacgacgtatctagtttaccttccaccaccagatccattaagaacggataatactgcgcctggtcagtcatgaattcagaccagaagaaaagaaaacctaccttttgcggccacgtttgacctccacggactgtcagagctttctgcatcaatggcccgatcgggaaatcatgcgccgtgaaaaagaaatccccaaccaatgctacgttaccacccttacgggtcgccttgatcattgccgataatgtatcactattatccctctcaagcccaatcgcccgcatagccgaatactcaggttcctgcgaagtacgatacccactagcctcaatagactgatcaaggccgtggttctgaagcgacagaatatactccgccacgtccggatgcccatccacattaaccggaatcatgccaaagtcctctgcgatctggagtcgcgccgcatccttatccatggcatagacctttttcgccccacggagcttcgccagtcgctgcgtagcgaggccaataggcccacagccccatacccccaccacatcgccatcctgcacctcagccaattccagcgcatgccaagcggtagtcacgacgttcgtcaagcccagtagcttctgcgcatcgacatcgtccggcgcccggacacacgataagtcggcatgcggcacgcggcagtattccgcctggtcgcctggatacccgccacacagccggctgtagcccagcttcccgccgagtcggtggccgtacgtggattccgtatccggggatgggtttgtgttgtcgcagagcgaatactcctgtcgctggcaataactgcaggtgccgcatgagatgacgggtaggatgatgacccggtcaccgggtttgagggtcttaacgtccggtccgacctcttctacaatgccgagggcttcttggccgagaatgtcccctttttccattgcgtctttgagctcgccttcgtagaggtggatgtcggaaccggagatcgtgcagtgggtgatttggactatggcatcgctggggtcggtgaccttgggcttgggtacgagtcccacttcgatttttcgtgtgcccatccactgcgctgccttcatcacttccgtggggtgcggcgtgtatgccgtgctgcgttgtattagattgaggctggctgtgtgcggaggcatttcttacctgggcattatggccgccatagttgtgagtagtagtcaattgccaactcgaaaaatattagttcgaatgagtatcgaggggacttattgactggctgttgatactgtcgacgtatagtcgtttgctccaattgttgaagattgagctatggtagacttggagcaatggcaaattaacatcaagatgatgccaccaggagtggccagaaagtcatagagttgccatgaatggtcatctgatttctcggtcctatggtttttcagaagacatatccgagccggaaactaaggccggctatcaacacctaacggttaaggcaaagatcagtatagagtcaataacattgcagttagggtatctcgatctcaactggctttaaccacactatttaaatttaaaagtacatttgttcagcattggttcaatctcatacatacactggtgagaacaatgtacaggatcatttcgatgttggcagggataacaagtcaatgcatcgtattcatgcgaaaagaaaataggatatcttaaaaagaagaaccggcatctttattcgcccgctgagcaaaggacttgggcagtttggttaactggccgctggccataatgtcccccgaatcactctcgctcctgctatcatcgccagactcagatttgccggagctaggcacctcgtatacattactggggcgatctcgggcagacttcggctcaggtcgcagcttagcagccatttcctgttgttggctgctaaggatatccttgagtgttggattcgttttctttgcaacaactgcccgaggtgtggacttttgcgcctccagcttctgttcacaggctttcagttcattacgcaagggttcaagtcggtcgcggagcgactttcgcttaaccattgcgagcctagagttggctaatttctgcaagagttcctgcatctcagttaaaatgaaagtaagctggggatcaaaggctttcccaagcttgcgctttatttcttcttcctcctccctttcctttttcttttgttttgtctcctcggccctagactgtgccttagccttcttttcgatctcaatttcccgggtcaactggtcgatatcaacgccgagcgggtagaccacttgactactggatggtatttcctgaacatgcccggaagcgggtttgggtgtttggttatcgttattggtcttaggcgtgacttggctaaatttggaggtcgaaggtgttcccggagtagatttagcattgggcgtgggcgtctgtagagtagactttgccttatgtgtagccttccgtgggctagggttgttggtaatggaggtggatgtgctgatcgcagtctcgcgcggagtggagcgtggagcaggattcaagctagaagcaagttcctctccttcggcgaaagacacggatcgcctctccgttgccggggaatccttaccacggatagcggattgcagcttttttgttctggcaatcgcaggggtatgtttgttaacagcagtcaaagaagactcatcagtaacagaaactttgccacttgggaaaagcggcccaccgagtgactgctgggtaggtgttacgtttgaatcctgtaggctgacgggctgcttgctaggagggctctgcgtaattcccagcccaattccagatcgaggaggcttaggaggcgctttgttctcctctcgaacactggcttgtcgagctggactcgagaaagaaggcgcacgggatcgtctgcgaagtggactcgtttgggcaggtggcggtttcgatggggactgccgagcctgttcagaggccacaatggccgcgggcacggacacaggaggggtagatgttggccgcgtcgagggatgggcctgtccttggcgagcttctttgaccgacgttggctcttcggaggcctgctttcgcttgcgagatcgattctcatgggttgtaccatttgttgttgacatcgcgagatccagatctgaggactggaagctcccgggtatcacaggctcttccatctgtgaatcgccctctagatcaatcacatccccagtgatcggattcgagttatcaatttgagacgtgataggtccattctcttcgctggcatcagagtccgagtcagactcggactcagagctatcagagctatcagaactatcagagctatcagagctatcagagctatcagaactatcagagttatcagagctatcagaagtgtcagaagtgtcagagatagtctgatatcctgttttcctctgatcctgctcggcgttcttctttttctccgcttcgaccttgtcatcctcgctgtcactctccccttcgtccgactcctcactagaggtctcgatcacagtttccgcttgagatttctgcgggtgggatacaatcttagccattgtcgccagatgcccttgtgcgttgactccattggtcatgtccgacttggatggtattttcacgttacgttgcggagcagactctggtgccacgtcactcgagctcgcggtagcttccttggtagattgtgtttgttggtgggggatgatatggttaggcgcagacgacatgggtggggattcagcgtcgtcagggatttgcgtgattgttcgcttagctgtactactcgcaatgggtaactttacgagcttttgcggattaggttgcagtggtgacccagcagctacaggtgcagctgtaggctgggatctggcgctggatgctcgtcgttcggctggtgatggagactcgcccagctcctcactttcgtgcctgggaggcggcgttccagcaattgtagggcctacagacttcgctggtagctgaggggtagagcggttgccggtttcaacagaagaaagaggtaaatcgcgattgcggtgctcaacaggtgacttccgagctgaggcacgagggagattattgggcgatccaggcgaatgttcccattgcatttgatcctgggaaagatattgagagtgaccgcgcgagggttggccgttgctctcctcatcttcttcctggatggcagggaattgggcttccatggcttccttcttagcctccatggcgcgcttgcgtttgtaggcaacaatagcagcatcccaatcctgctcgacagaggggaatcgctccggggcagccgcggcaggcttttgaagaacgcgaacggagccacgctggtcaaggccatcggcgcgagctttcccgtagtcgacccagacatcagcaacagtcaagtcgggataaagatcgaggtcctcctttgtatcgtcgagaatcttcttaatcgaaagcgatctatcaaccaacaacaatgttagcaaccaaatttcgacagactagataagtttctcatcaagtatatgaacactcactccagctctgggtggagctttccccaatgctcttgaatcatgtccgcaagtccaccgagcgaaacctcttcagggtgctcaaggacaagcaagaagacaccgggtttcttcaatgtcggttcctggttggagacattgttggtagtctttcgtgcgccagggaaggtcctgccgtagctggagctcgagttcagctgatccggcgggaagactttaattgagagtcggaggaacaccattgcgccagataatagaataggcagtagatgaatatgcagctaatggttgtgattggagcaatggcgcgtgagggagggaggtcaataaaagccggtagagctggggaggggcaattaatggtagggagcaaattagcaaagacaaatttatcagacacacatgtcctctcaaagagacaaggtgccaaacaccaaacggaatggtgcagggtgagtgggtgggagggagaagaaaagcggaagaaactgacgcgaagtagtaattgtccagctccacttaactagtgtactagttatctgccgtgactatctataaaacacatctgctaatttaaatgagaagagcaagaagataataattcatggatactaggctattgttcgttgtatcctaaagtcctgtctataatctaaggttacgggttcctgcgcagttccatacaatatagatgaacagtacagacacaaattcttgtagtattttcatatatgatttttaaataatgtctctagagatggatctattccggaggcacaaaatacctccggaagcgatcattgtgagctaaatccagctcaacaatgaccgaatgacagctcatcaacagacttgggaacctgtatgtccagaaattgagatatccttcaggcaagccaccaatattatccttaagatgatcaggcatatcgttgtagtgattgcgcttgttgcggagagccctcaggagatccagcatccgccccccggtatatttgcgctgcttgccgagattgtctttgaaatcccgcggcaatgagcgcaggaaatccatgtcgggacccattactcgcttggccactgattccaaacaaagcagtgcgtctgatggaggctcgcggggctcaaattcgaagtggtcagatacatcacaaaggaaggcgagacggtctgatgggggccagaagaacgggtgcattaatacagcgcttgcatcaggactagaaattcatgttagtaagttgggtatgtttccgcaaagaagagtgcttaccgttgccgagggtctagagacagcattgagcggatcagatcatccgcctcgaaagcgtagtcgcctaggcggcttaattcttccaaatcgaattggcccttgacgatgtttgcttcacgcatgaacttgccatttttgtcgaatgggtggctgccacgagtcaagacgtagtagaacacacaacccagcgagaaaatgtcaatggcccgagtggcgcggcggttggtctgcgggtccaccacagccggctccgaagactcggtatgctgggatgcaagagatatagggccgtcatcatccaccaggagctcgggggcacgccagccggaagttccagcggcgtgagcagtggttgcccggaacgagctttggttgtcttcgagtttcttgcacaagccaaaatccgagatgaggagacgcaatgaccgcgaaacagtgcggccacggggcatagccacgaggatgttctgcggcttcaaatcacggtggacgatcttcaaagagtgcaagtaacggacaccctgtgtaatctgccgcagtacgtctggcagatctaagccggcttgaactagttccgggtagctagcaggacgctcaatcacatcctgaagagacgctggacaaagctcgaggccaatatacaggaacccggtggcttgttcacggcagaagtatcggatcacgttgtggtggtcatcgctttcctgcaataggcccacttcatgggacgcaatgtcatagaattccatcaacatacgcttgaccgcgacgtctcgtccgtcgaacgaaccgcggtaaaccacagtgccatggctgccatgtccaagcacaacatcagtgaaaacccgaagccggcctatgcgaaccacgccatccatctctataatctcgttcgagatcgtcctggtcatctgtgcatcggtttcaagtcgaggctggggggctagggtgttgacttgttcggcggcctgatcggctccttcggggccatcaccctcactgccaggcttcttgcgacggcggtgtgcctttcctcctcgagatccacgatagcgggtttttttctttggctttccaggctcatcggcatcctcgtcaccaggcccacgtgacggctcgcgaatctgcacccggagggtggaatctggattgtattctcgggaagcacggggggttaatgcgccctccggtgatgcatcctctaaatctaagtccactgtgacgtttggaacttcctgggttggtgtagatgaacgcttgatatccggggcaccgccgacaagaggtgtggaaggggtcgagagagaaggcttatcattcgagttgatgatattcttgatgtccaacttctgctttgccaaatcgcgaatgtgatgcgagttgaagtaaatgaaggtgcagatgaacagtaaaatcaacgtcacgacaatatccaaagcattgtcccagctcttgcgaatgatggcgctattgcgcaaggcgggaggcaaagccagctcagaagggctgcgaaggatatctcgtggtgtgtcattggaaagttcagaggtggacgatccggcgattctaggaatatttggccggattatacgagggccagtgagagagtgaacaccggccaacgcattccgctgctgacgcgcactcagactcataagcgcttgcccccggcggaagaagtctttgtcatagcattgagccattggagcccggcccgtggctaggggataggtttcctccgaaaaggcataccagccccccgcctcagtgcaatcgatgtatacacgcatgtccctttcctcgttaagggatccataatctggatccggtggctggctgggttgtgagagcaggactagcggggtcgaggcatctggtgtatctttgttggcaggacgaaccacgtcaaagactcgcgccacaggagatgaaaagcgctgggtatagcgaggccgacccatgcgcgagtgatcgaatcccagtacaacgccatcatgcatactgtaaatgtgactttcatccatcgtcctgtagtactggctttgtaggtccatatcacgattgtttggtgcccactcggagtacttcaaggtacaaattggatctcccgtctccgtgttttgtatggcaacggcatattcaacccgaccaagaaccaaagtgccagatgtcgactcgcattcatcagattccaaatcttctccgtccaccttccgacattcaggtgcagcggtaattggaccacgggaactaaacacccgcaggatgctgccagtccgggcgtcaatcgtatacaatgtagtttccttccgggcagtataggtcacggcggggtcggtgccggaataaggggtttcgtcaacaagctgcttcactgttaagccgagcttttgcaagccggcatctggggcggggctgtagatatataggctgccatcctggctcggctcgacgatccacaaaaagtcgtcttccggttctgtatcgtcaaaactggaacgattcgctcggtggtagatgctttcgaccacaggactgctcgggacctcgagggcccagcgagcagtcccggtcttacgatcacgggcgtgaatggttccgtcgacggtcgccagcagcacaaaatcctcaacctcccagtcctgcaaggaccgcgcgtgaagctgcgaagccaaaccagcagcagtgctgctggcttggacaggaggggctcgaacggcgcggccggagcctgccagagccagagtagcaagggcgctcgcatcgttgggtttcacgatgggtggtgcggctacatgggccgcattttgtctagatgactcttgtgctagtggcacagagacgcgagatatagggtcatgggcatctgattgctgcagcggagcgaccagagctgggagaagaaggagtgcgacactggcggggagtgtcgaacggacgcccggcagccgccaccgcatcgtagagctgtcagcacaaagattgaatagtagatgaacgatcgagggagcgaagcgggtaggggcgtctcatgggccgatgtgaaagggaagaggtttaatggatcgagtgatagtgtggagcgagtcgagtatccgggtagcggatcatcccccaacccacaaatgatcgaaatggaaaatggcaggaaattcagtctaatgataatgcatgaagagatggatggaactgtcgaggatgccacaatattgaagagatgaaaggatgaaaggagagaggttggagagcaggcagagagattgtgtgtaatacacgtgtacattacaggctgtcaccaggatttcccgcctccactgctgtaacggtaatgtacggtactttgtccacgcacgccttcgatctacactcaatacagcgtagcctagaacaataagaacattcgagagccccttgataggcgtaatccatataacgtatgttgtatacgtgcttatagatgtgacatagaaccctctatgttttgtaccagtcatccttacatacccggttcttgcttactgcgtactaattatggattgatcatttgggacgagtctgtcagcgtggatcttcacatgctaatgacgaagattgaagcctttgagcaaggtgggtcaccctgcgcagcgtcagggggctaagaccaatcaagggcgagacagcacactacgttcaagggtctcatgaagaaagaatcagtccattaccaccaaagatttttttttaaaaaaaagaactatgtaaatcaaagcagcacatccaacgccacaaccccgtcttcgtgcagtacacgccggaagtgccagtgaaggggagggaaaaaaaaaagaaataagaaaagggaaacacaagaaagatcaagataaatacaggtgtagagggatgtggccacagaagcatgtggagagaaagggactataaaacaaaaaaaaagggatatcggatgttcccaagaaagaaaagatggtagatattaagcgtgagacgaccttaaccgccgcggatcatccaggtcacagcaacagcccagccactgacgaagatgacggtcaagatgcctgcacctgcacggtcaccggtaccgatggtattcaatacagggacatcattgtccgaagtattagtgccagcggtcgggttactcttggaagttccacctgatgttaaactcaatggcgccttgttcttgaacggaatcagattggcagccaggacacccagcacagccatctgttgctccagacctttggtcccgtcccaagcggcttgcttgtaccagcgaataccacaatgtacaccgtcatcaccacccgagcattgctttgcagcggcctgggctgaggttctcagctgagggaagatcaagtcgtaggtgtcggggacgattgtagtcaacattccaagccagttggcgaaataggccttgaaggtaatttggttgcgatcacaattaccgccggcttcgcaggtgatctcgcaaagaatttggccaccgtctccattaaatcctgtggtcgggtagaactgctgggaggtcttgatgaggcccacaacaccatccttccatttcgtttcagtgccattagtctagtccgaggttagtatcaaccattcttaggcagcaagacaggacatacgtagttgtgcatgtaggcggcaccactgatataggtggcatagttgtaggtccactggtaatcgccatgatccgtgcactgcgtgccgcaggtggtagtatcggcgatgttccagttcttctccttgagcagcggggtggtagcactccaatcccaaatgcgttcagcccagtcagcatatgtcttatttccggtgtagagggcgaggcgggccgaaagttggaacagtcctccgttcgaaatcgcgttcttcgtaaggtaaccatcctggtacggccaaatctgccagcgcataccaccgtggcagctgctcgtatcccatcgggggtactgggtgttgaagacaccctgtgcgagagatacccaggatggttcgccatctctttcagggtagttgaattccgcggcggtaatagcagcgagaccccaaaagacctgatcgtcgttgcccaggtactgactatagttgctcgggaagaaattgtcgtcacccttctggaaatacattccgtcctgaacggcgtcgttgaactggctgtccccggacacgaaccagtacatgataagggtcatgaacatggaaccgccctcccaccaagtgccatcgaatttaccagggatgtccttggagtcgcgagcattgtagaaatccatcatcgtggtggcgactgttttggccgcatttttcagggaggctgagagaagttactgaattagataatgaatgcgatcgaagggggggagaacgtactctcgtcatcgaggttcacatcgatagcgagggcaccctggacggcgaacgcgccacccagtagagtggccagccacttggacaaaatcatatgtgggatctcaaacgagcgtaaaagccagtggcataagggagttgaatcaaggaaatagaagtttggagagaaagtaaaggtggctaagaaaagatgacggggtaaccggcagcccgggggttacagtccctggtacagtgggctggctccgtctaagaatgttgagttattttaacttccacaagtatgaacattcttacgattattatattctatagattctatgcattttatatattgaatctacattctgcacttcacctctaacaataggaagtatagaattaccaaattgctgaattgctggtcgactgtccctgaacctaaaacgatgacggttagactcagttcctggcggcaaatctggccctgcagtaacgaaatgaaacattaagcttagcgagacaaccccttgatatttgcaattgatcatggtgtacctacaaagtacaacgtgttttgaccagacaatgtcgatctctaactgcacgaggatatattactataaagaatcaaaagcggacaattgccttggctaagggtccgaactgaagtcaccgctttgagtctgccgcttcgggaaccggtgccttattgttcaggtccagcccgaaaggcacatcaacaagacgtaaggtgtatactttaaaccttggaatagttcatatgagtatgagagttgtgctcaccatatgcaggcctgttgtagggttcccttaactctctcgatgatagactttacaatagtgagaccgtggtcatatctagggtgtaatatatctacttggcagactacaaaaatggctagatggatagatcatgtacttagttgacttctattgcacatttttttagttccttcatagaaagactatagagatgaattcatccatgtcatcagaatcgtgtccattacatccggttacgttggcgaggagccgcacggatgatgttgtccacccgcaggagaagctaaataaagtcagcgcgtattccccatagaaataaaaaacaggtgagtgacatacctcggctgcctctgaggcagacgaaaccaccgccttcttcaacttataagcctccaccacaccaagctcacgcatatctgcaataccaccaccgggcgtcaacaggtcaagaccggagctggtcataccgttgttgatggccgagcgcagacgagtcaccagatcgctggaatccagaccagcgttgtcggccagaatggtaggcagctgcttcaaagcgtgagagaacgagtcgacagcaagctgtttcttgccggtcgtattctgagccgcctgttccacggccttggacatcaccatctcggcgcagccgccgccaagtgtcacacggggatccttgacggtctgcgagagaacggccagagcatcgtggagcgaacgctcggcctcgtcgagaagctgctcggtagcaccgcgcagcacaatggtgcaggcctgaccagcagccacaccggagaacttgatcagggtatcctcaccaatgatcacttcctcgatcagatcacacgcacccagcttgacctgatcggggtggtcgaaggtggaagcgatctcaccgccagtaacaagggccaggcgctcgatgccgtcgaaatcggcgtgctcgatggacatgatacccgcctcggtgaacagctgctcgggccagttgtaaatgagctgacggttaacgaagcagttaataccgtgtgccttgatgcgctcaaccttttggcgcatcttctcgcgttctgccttctccaactcggcaagcttgccggtcgactcgaccttgactcgtgcgccgaaaatcttgaccttatctgtgtccatggctgtattggcgaccaagatcttggcgttctccaaccgcttgggctgattcacaccgaccttcttgtccataatgaaaccctcatcgaggtatgaatcgctcagctttccaccggccttcttgataatctggatgtgagagaggtcggtggatcccttgagacgcagaacggcctcgcaagccaacttggcgaattggtcccgatcttgcgacagaaccttggagctgagcgttgtgcgggcaatggcgtgcaagtccttacggaaagcctcggggtcagtgctgcggtcgaccgccgtagcctcgagcgcggcgagagcagccttgctagctatccggtaaccctcgataatagtctgggggtgaatcttcttggcaacaagttgttcggcctcacgcaacaactcggcggccagaacggtaactgatgtggttccatcacccacctcatcgtcctgcaccttagagatattgaccagaaccttagccgcagcgttatccaaagcgatggacttaagaatcgtagcaccgtcgttcgtcaccaggatttctcctgtcgacctgtgagaacagccatgtcagtaattccggggttatatcaaatgatcatcgacaactccaccacatacgcagattgtaggattttgtccattcccttgggaccaagtgtgctcttcacaaggtctccgacggcgatagcaccgacaaaagctgagagacgggcattttcgcccttctcttcgatgacatcgtcaccaaagatctgtgtgggattgccaaaagatgcctaggaggggtagaggtgagccagtgcgaacacatattttccacgctctagcgagttgggaatagcgtaccataatgaccagctgaataaggcaatcgaccaaagatcaaatgtcttgctggagaggttgaatcgacttctcctgtcaacaagtggggtgggaaaggagaaaagttgccgcacgattggcccgagcttctgattggctgcactccatcaccgcctgcgatacctctagacgattcctttcttgtcgtgacgatccctttcgctgggattgaccttgtttctgtcagtgtcgacaatggctgactctggcaaactcgctccggctgctgcgaacaagcggcctcattctgctgtcgaggctgagaacagtgagtcccctgcctcatggacaccgttcagaccgctccctcgaacggaacgcaagagatactaactgtatgcgattgttaggtggtgactcttctgacgatgatttcggccctgcgctgccctcggaggtcgccccaaagaagaagcggcgcaagcttccttttgagaaagtctacatcaatgctctaccagtctccgcacggtactccaagtcccttatgcacaaggaccaattgtcgtttgtgacggttgccccctatacggactttgtgatcacttcctccgtcgatggatatgtcaagttctggaagaagatggcagaaggcatcgagttcgtgaaggaattccttgctcacccaggcgagattcggggcgtatctgtcagcgccgacggccgcagtttcgcaacagcgggaatagacaagacagtgaagattttcgatgttattacatttggtaggttcaataattgttgctctcccggtctaatgacttactaacatggacagatctcttggcgatgtatacactagactttgtacctcgatgtgtttgctgggtacacccgcgtggggcctcgctgcccctgctagccgtaacagacgagtcaagtaatacgattcaagtattcgatggacgtggcgaaaatcccgaacctttgcacactttgaagtcgatccaccgcagcccggtggtttcgctggcattcaacaacgccttcgactgtgtcgtctcagccgatgaaacaggaatgatcgaatattggagagccggagacggatctttcgagaaacccgacaatgtcttcgacttcaaatcctcaacaaatctcttcgcatttaagaaagccaaatccgttccgacagccatcacaatctccccatccggcaaacacttcgccacggtctccttcccagaccgacagattcgagtattcgacttcgcaacagggaagctttaccgcacatacgacgaatcaataaccaccatcacggagatgcagcaagccggcacagcaccgtacgaactggacgaagtagagttcgggcgccgcctaggtgttgagcgcgaactggaaaacgaaggaacgcgcaacaaagtaaacgtttctttcgacgaatccggccacttcctcctctatggctctctttacggcgtgaaatgtatcaacacctacacaaaccgcgtagtccgcgtctacggccgcgaggagccattccgagccctgaatctcgcattgtatcaaggacaaccgcaacggaaaggcatcgtgaccgtctcaatggcagccagtagcaacccgctcctccagcaagccgaagaacgtgacccaatcctcctctgcaccggcttcgccaaggtgcgcttctacatgttcacgaacgaaacagacatctcgaaatccactcgggacgtccaaaacgaaaagccaacccaatcagcggccggcactggtccaaccgccaccaaaacggccgagaccggcactgctgcaatcctgcacacaactttcggcgatatccacctgcgcctatatccctcggctgcgccacgggccgtggagaactttgtcacacacgcccggaatggctattacaataacacgatcttccaccgtgtgattcgcaaattcatgatccaaggtggtgacccgcaaggcgacgggacgggtggagagtctatctggggcggggaatttgccgacgagttctccgttctcaagcacgataagccgtatacgctctcgatggccaatgccgggcctaataccaacgctagtcagttcttcatcaccacggagaagacgccgtggctggataataagcacactgtctttggacgtgcggtgcagggcttggatatcgtgcataagatcgaaaatgtgcggacgcataaggagaagccggaggttgatattaagatagttagtattagtatctcgtgatatatcggcccgggtggaatctaggcgttgtattacaaaatatgtgtataaggaatcatgaaatgcccgcgtgcgttgtactatgtacacagtcacttggtcagacaggttgaaaaaaaatggcgaatatgaccgtagaaagagaatcgacacagtcgtcggcagaagtcgactccgcctatttttaggacaaaagcccaagaaaagaaaggaaggaaaagaaagagagagaaaaggggcgcaaaaccaacaagaacaaaaacacagcatgaagcccattatccgcaccaaacaccaagaaatgcaaccatggccaggtagcatggtatagaagtagcgcattgcgaaaacaaaaaaaaaatcaaggacaagaaaaggacataagaaacccaaagatccaaaataagaagtgaaccaaaacagattttaaacctgccgaatctccaaatccccagagctctggtcgacctttgtcaatcgcgtgcgagccccaggcaccggggtgctagtcttcgccatcgtagagcgcgagctactagccaaggagtcggcaccaagggcggtggtctgcaccggcaccgggacagcccaggcggcatcgcgcggaccgggcggggaagcagcagtcaagaagctgctgccgccaccgtggtagagattgggccgtttagcatcgtagcggcgcttgaaccatacgccgagtacggcgatggtgctaaacccgatgaccagcacgatgagcatgatgatccagcggtagtgggtactccacctatttaggggggatttatttagtgattggtctggatggtgcagttacgattctaatttgcgctgcggtgttggggatcaaacataccatgacttcttcgtgtccgctgtggaggttgtgtttgtggttgcgctggaggtggaagtcgaagtagaggttgcgtcggttgaggatttggttgtggtggtggcagtgccggttgtatccttgccgccggagttgcagtagtcgacgtaccaggttgagagagtggtttggtctgcggcgctgcaggaggggcagatgctgccggaggttttgaggccggtgagtagggatgactggcagaagcatgaggtccaggtggaggcttcgcctgattcacaggaggtctgcgcgcttgtcagggtggtgcaagtcaggccgcattgcgggaatttgctggaggctgctgcggggaggatggtgtcggcggctaaggctgagattgtgagggcgataagggcgaggaagaggaatgagaggcgcgtagtgagtgacatggtgagagtgatgttttcgagttctctattttaatgaggggtgagtagcgaatgtggaagtgagagccgtccctgaggctcgattagatgtctggataggatgtcttagtccattgttgcataggtgaaagagagaagagtcgcccgaaagaccaggaaaacgagacgaagatggttttgggtctagtcggggcccgaacgattccggattcggctttttggtctttttctttgattttttatggctctcgaggggaaatccgcgggtttgattggtcggatcggtttggttaatttcttttgcttctttaatctcttttaattaccttataaagtagtatcgtagtactgtagtactgtacctgtacatggcatcgcatgcgttttttaatttccgcaaacggaccgtggaaacctcacattctaccttgtcgcattctgacgtctgccaggtccgatattaggttaatgctcggctggttctcaaggttagtttctatggaatgagctattggcgctaactacttcctatgcaaggagtaactatatgtatattctgctgctgtacggagtacaatgtgcgatgtactcgaagtagttatataggatcgagttatttacttgcctattcccttctaatataatttactaacctgtaactcatccgtctttcattaactccaaacaagggcccaccacgatcggcagtcgatacttggaataatgcgatgaatctgcggttaatcgtacaggtacttagctagatacggagcagagaggtttcattgtctttgtggtatactgatcgtctcgttgaggcttgaaagatcagcactagggtgatattccaccgaaaaattctttaactgtatctagaatctaggaccagttattaggggctttattaccgaagggaaggactggcggtagaccttttaggtaatcgcgaatcctagttaactaactaactaactactcgataatctctgaggtaagggaattaccgagcctatattagaaaatatgaagaactacggtagtaaccctctcggactcactggcttatctggccctcttcaccttttgcacatttcttgctagtagaagaacgaggctgataaagagactatctacacgtttgtcaacaataccatagagaaggtcattgccgaggctaagagcgtcggagtcttcaatgaatatgtctatatgaactacgccagcatgtcccaggatgctgtcgctggatatggtgctgctaacaaggctcagctgaagaatattgccaagaagtacgaccccagggaggtctaccaaaagctgacacccttccaccttcacttcttagcagtcaccccatggtattctcctctctagcaccctactactcccagtgatgactctgctctcacacctgtttcgcaggcaggcatgtcggtgcccctgtcccccgcggcagggtcccctcttcagtattattatatacaggaggctaaatcttttttatctttttttcttaacttttacttttcttcctacatttaatcattcggttagatgcaatgatctgagtctgcatccagactcgcttgtaatcacggcagccatgtcctaaacactgcgggcttttagaagaagacaggctgatggtgtgtttattgcgcggatcggcgaacttttcacgacaggcccaagatcgtccgggattgaggggttgcgggtccggatgataagtcgctctgtgattcgctcgctctggatgtcgagaaatcgctcgggaatatgctcttatatactttgttaattccgacggatttaggagatatgtcgccgtcaaggttctattgtatatcataaaagggcttgtcaaatatagttatgaacccagactcttttagctgaatcatcctatcataaacaaaccctcaaaatggcaccgaagttcaccaaactccgccctttaggcaagaatggtcccctagtgccagccattggatatggtatgatggtcatgacgtctcctagctacggggcttcgcttgaagatgaccagcgtttggccctgcttgatcgtgcagtcgaaattggggcaaccttttgggacacggccgagtgagtattccgttcaaagtcatatcgttttaatgtctctgacaaagcaacagtatgtatggtgacaatgagaagcttttggctcaatggttcaaaaggtctgggaagcgcgaccagatctttcttgcatcaaaatttggatatgtcaaaggtagccatacgttggaaatcgacacatctgctgcctataccaagaaagcttgctactccaccttggagaacctaggcattgaatatttggacctttgtacgtgttgaactatgcaatctgcattcgatatatcataacttctccataatagctaacgcggccttagactatgtccacaacgtggataaagttactcctattgaagagaccatgcgcgctctcgtggaattacaggcgtaaggcaagccatacccccaatcaaaactaggtattgactgagcatttcagcgaaggcaagatcaagcacatcgggctatcggtagtttcctccagcactattcgccgggcggctaaaatagcccctattaccgcctaccaacccggctactcacttttcgagcgtctgatcgaaggccctgaaggaacccatgcactagccacgtgccgcgagctcgggattgcaatcgtgtgcgcgacgcctctgggccgaggcattctcacttccgggttcagtcagggtaaagcaattggtgccgaggcggatatacgtgagaagatgatgccgcagttccaggatggtgctaaagagcacaatgcggacttggcgaggcagatcaagattgttgccgacagaaagggatgcagcttgtctcaattggcgcttgcttggctacttaagcagggtgacgatatttttcccattcccggtactaagagaatcaagtatttagaggataatatgggggctctcgatgtcaatcttaccgatgaagaagaagcggagattagagcgctcgtggaaaagactcctgtggttggtagttcggttcccgatgcgtttaccgggatgctctttcgcgataccaaggaagaatgaattatttatatccagacatagaatctcatatagaaccacatgcgtcagagaatacactacaacatatgtatcaggtttcgattgagaacatataataggtcctagccacctctagcggacttattgatgtgtggttatactgtaagcccccgggttatttgtgatgtatggacaagttaggcgatctacgtaaagaggccaaattagaaaaacaagcaatagcaatctcagggctagtccgtgaggaaatctcggagatgattggataacagctccacctattattcctcccccgcattccctcccttctccaaccctcccatcataccgacaatgccgacaatgccaacaatgccctcccggcaactcctttcaaccctaataacctccctcaccaacacccgctggaccctaacccgaactctccggagcgaaaaccccctggatctaaacggcgagcttcgcgggaccgcaaccttcaccccccaaccccccaccaccacagccgaccgcgactggctgtattgcgaagaaggcgagatccctagcaatgtcggaggccccttaccagcgggactacgttggacaaagaagtacatatggcgcctaggcagcgacagcggacacgtcagcgtctggttcgtgaaagtcgcgtcgggcccggaagaagcagactacttattccacgacttcgactttgattcgggttcgagttcgccgctagggtcggaatctgggtctgcgcagaaggatcccggcgaattcgtcgcgccgcccgtgccgcccgctgtgtcaacccccggcaatgagatggagactactgtgcttaatgctaggggcaaccatctctgtatcaacgatatgtatcgcacggcatatgcgtttcgcattgagcctgataccggggaggtgcttagctgggctagtcggcatgttgtgcgcggcccgaagaaggggcaggatattgttaatcggtacgagaaggaggcatgagataagatttaaagtaacctacaattgtgatgcttctttcatgaggctacgcggatggtcgggttgcttggaacctggaatttcccgaggtctactgaaatcacgatcgtgatgatatgtctatggatgttcatatattcccacttatatctcgatctagctccgctcttcattccacgcccattccacccctgctcacagcgtgtaaaggaaatccggtcttttgtcacccaacaactcgatctggctctggtccaagccctcgatccagtggtcgcgttcgccacgtctgcgcttgccgttctcacgccgcagcaggaggtactgcaccacggatccgccaaagaggaacaggaccaggtaggcgagtactactccgtgaccggggtagtagtttggcttatcattatcgcggtagatgttcgatgatacgatgccgttgagatttccccagccgatgataaaccctagggagacacctcgtttgtatacacctagacagctcgagttagttttggctgtggtcattcatataagaaaaaaccggaatccaggttgaaattaccttcggtgttgttactagtccatgaaatcgtgttcgcaatggctgggtagatgcccatggccccgaggaaagttcctgcatatcgagcgccggcggacttacagcctagtagcatagcgaatccaatcataccgaggaacgagacggcgatattgcagaggccacgctgtcttgtacggtctgcaatgaagcctactgccactgtcaagacggcggcggcggcatatggcggtacactcagcaactgtgcacgaatcgcgctgtagcctatagaagcatccagtcagtaaatagctccgatataccgagcgcaagagccaagcttaatattcaccctaggaaatcttgttagcttcagaatctccaatgtggcgatgtgacaactcactaattcattgataatagtaggcacgaaaagcgagaacgcataaagcgacccatcagcccccatataaatcacagccccagtataagtcttccaatccttcagactcgaccagaagtactccatcttgaactcctcatgctcagcactcgactgctgatccatagcgagtcgcctgagcacgcgcttgcgatcgggatccgacaagaaccgcgcctgatcggggaagtcatagacacaccaaaatgaggcaataccaatgaagaacgtaagaaggccttccaggatgaaaatccacgaccagcctggcttgccggccacgccgtccatcttcgcaatcgctgctgctagcagaccaccaaatgaacctgcgagcgccgccgccgagaagaaaatcgccattcgtacgccgaattctgagcgcttataccagcatgagaggaaatagcccactcctgggaatagaccggcttccgataggcctaggaaccagcggactgccatcagcccgtggtagttctttacgaagcccatgaaggtcatgcaaattccctggaattggttagaagagtaatgtgttggaagaagggaagatttcacttacccatgccatcataatgagtgggataaatacgctcggccgcatccgctttaacaggacgttggtcgcgggctcgaagaccgagtacgagacgaaaaatatagtcagtgctgcattgtattgggcattcgtcatatttagatctgtttttagaccgacgagctttgcgttgccgatatttgtccttgagcgcggtgagattagtttgtgatatttcctcggaagccagtgcgcgaataagatattgctcttttgcttaccggtcaaggaacgagacgagatacagtagactgagccatggcacgaggcggatatcgagttgccatagtagtctacgatcctatacggttcgtgatctggttagttatcgtgactttacacgatgctgaacagaaattgataacatacaatcgccgctctttcttcgtcgctcaatcctgcgtcgggatcctcaaatccagctgcagcaagcgcatccttagaatcggaaatattctcagggtcctcggaccaggattcggtttgtttgtcggaggattcaacgaccatgatgcaagatcgagcagaggccgggggatggtcaggaatgtgcgattgctctacgccgaccggcgagctatttaagaagaacagggaacaggtcaaagcagaaaaagacagccaccaagcgctatgtaaagaggggcagacatgccaacgcttatgctcggcagatggtcgagatttgccagggtccagctgaaaatggtatgatccctacatcctagcccgcgtcctaaccgcgtacaggggttgctgcattagcttgaatctggatgttggggcccgttcaggcgtgatcggcatgtagaaagtgagatcatccgtggaggcgacttcaaacgggaagaaaaggacaagtatgtttgtacgccattgtacaatatctgattcagcttgatgttgagtcttgaatcccccattttagtacatttttgatacattggataaataggccaagtctgggcatccggggaaaattagggcatcccccgcataccccgggctccactaagcgaagctttgccccggggccgtctcgatctcatcaatgttggacacatgtacggagtcctgccaagtctataacggcccgtttatttaggccgacgcggagttttgcttggaaacctgcctacgatgtgcactcggccgagagaaataggtggtgtcggccgacgtagtcgtatgaaatgttgatcgccaaaagttccctcgactatcgagccattgaccgtgtagcctctcggatccaccacagatgaccaccttttgaccatgttttcattggacgtagtgaactcgggatagtggaaggattgtctcggcattgaccttgcggcaggttcctcctccgtagccccgaagaatttgtgccaatgatcatgcagctatatgataatatagaaagcgaattctaagaggtctgatttttcactgacagccacgctaagccccgcattcaatgtgcgcacggcttcactgacgttgcggggggtgatcgtcgcacacaaagttgcgtccgcagcgcagtagtacaacatcggcccaatttgatataccatgagctgcaataggcggctcatggaacaagcgctaacttaaaagacattgttggagcgaattcgggtggtcgaacctacgctgtcgaacttttggcaacatatttgtcgtatgaagctattttagaacgctcgttatgacttgtctccggagtttaacttggattttggtagtatcattttaatttgagttattgtgaggtctaaatgtagactcccaggaaaatttacataaggtcgagtcgggctcgcaagaaaattaccttgccggtaagaccaatggagaccccaaactcatggatgtatgtacttgtaaaaaacgcgataaccgagacgctcatgatcaatgcaatgcgcccattttgccttgatgtagccactccagggttaaacccgccttccatgaggcggatatgaggcagtcgattcggagcaagtgatagtattgttgcaatacgtccccaatctatgcgtttacaaaccgtcatctcgcttaatatcgcctggacgggattctggcttcatggggttaccaaatccattgacgcgtccatggagccacttgagggtaatggtgctcagtgccatgacagcggcactgagagtaaataggccaacacgacctgatgtgggcagtgcttcgaagatgggatatgggtacctagactgattagcgattgacgtcggaggtgctgggtcatacacgaaccatccgttctgggagaagcattgctcaatccagaaccagtagccgaaggcgatagtgccagacaatgcgagtgcagggagtgcagtgattgtccagggtggggataggagcagcaggtcaatcaacatcaccaccgacggtgttgcgtggaagctgatgtctagaaccatgttattaggggtatctcaaatgcactttttacagacgtaccggcatggacgggtataacaatatcttcgggaatcaccaaacgttcatcgatcttattttgattagaacattgtcgaattagcatcgaattacttactaaacgaagaccccagtacaaaacgctgatcacaacctcaaggggggcactacatgtcgataggatgtttttgaccaggaacagtcgccgggacaaggtaatatccgctagtagtgcaaccgcaaaagtgagtgttgacaacgatagaccaatcacggtcagatattgaaaatgccaaccatatgcttgattactgtcaaatataaagttcagcgtgctttccaatatcgaagctagacgggagcttacgctgggttagggttttcgtgcatgcttcaagaatgtcagcaagaactctaaaggacaacgtagcagacgacccatactatttgaatgaccacaaaaaactcgaaagtccggccaactagaaggcaagcccttagcgctgaaccgcgatgataagtgaaaggaccatggtacttacatgaaccaatgccgacaagccccgtgaaggactcgacatccattggagcgggtgcctatcgatcatagatttggccattttggaaaagaaattagggatacaagcgctctcaagtcctagttcaatgtcccccgaaaatgctatcagcgcgcagctcaaggaaccaatgtgcatccaaggaaccggatgctatgacgttggttcaagatacgagttcacgtgacacgcgggatcaatcggcgtctgtatcggattataacataacccggctgattcatcgttccttatctcccagggctcggctggccatgtgcttccccacacttttagtccgcgctccaaagataacctttgcctttcttctttacatcaaattgtgacttttattgcgaatctgtgctcttggcctgcccagtgaggtcagtcgactacctagtgggtcaatcgatcatattgaacagatccatcttctgtttgatatcttgtttcatcccccaaggtcgccaagaccggcactccactggttactaccggcttctcttgccttcccattgctgaagggcagtgggactggaactgtttctggcacgtctctcccatacctcgatgtgcttgtatactaggtgtgggtgtctggtcgattatcgcttcgtcgctacttggggtcaacgaggatcgaaacgcagaaagcgtgccaattctgacgtgctttcggcgtaaggagtctcgattggactgatacagacttgaaaagactgaatctgtatggccgcgggaaagtatatagtgacctttggctatttcgagccgttatcttgaattatcgccgtgtcctctttacaggcatcggtactcgaccagacaccctcgacgtgcaatgcctcgtcctagaagacctggtgcaccagaaccaaagcgccgaagtcgtaaaggatgttggtacgttactaagatgtcaataagctttaccaaggctaacagtctcattaggccatgcaaagcacgcaaggtaaaatggtaagaagcacaacccttgtatgatgctcgtgtagctaacaattatgtagtggtgaagagaaaccagcatgtcttaattgccagcgacaaggcgacccttgcgattatagtgtccgtctgaactggggaggaaggacgaaacgcatgtcaattgactcgccgaattcacaatctagtgggtatggaggagctgtaattggattttcggactcattcgctatcaacgatctgagcccagtttcgttccccactccagcaagcaacaaccctgcagatggatttatcaacactcatcccggggagttgacttcgccaagagcaatatctccaagtacatcatcacaaatgggacttttcgaatcccccaggctcggctcggactctgaaggagtgctatcgccgggccaattagagtctcgattctcctcaacttgggcggaacaatctcctccattgaccgcatcggctacctcggcgcctttgttgcaatatcaatttggacagcatagttttgatagcccatcatatctgggttcgatagatcagacatccggcctcagatcactgtctgcctttgcattccatacaaaccccgtgtcgcagccagtctcatacatgcgccaccctgtagatgtttccaaccactgctcgggtccatctatctcgcactctcgtgatgaagagcatctttctcaagggtcatatgatgaccggggcatgcatcttggcgctcggtctaggacagggcaaaacagatcctcaaacagcccgcaggatactaccggtcttatgcttttcgatccacgcagagtgtcgattgctgaaagtgatgcaatctcgtctccgaggctccacgagacaaccagcaacatgggctctgtacatgactatcacaatgggttgactccggatcatcaggcatcggcggagagcaatcatgaagccgatcaaacatcccacgagtcttcaatcgcccggagcaaatggcaaacatatctgaatagtgtaaccgacaattatggattggattctgggcgccctgatcaggatctgaccttcaacaacgaccatgccgccatagatatcaattatgcgttagacctgatcagttctcggtggcgcaacgaggagtccaaagcctctcaacctgaccccgtaccacaggtccagttttgtagtggttactatgcttcgccagtacccatcaatgtcccgaggtacttatctccgcttccgtcgtcgctgctggagaaccccatcaatctgatgtacttccatcatttcttgaatcacactgctcgaatgcttgtcccacacaactgcgataataatccgtttatttcggttttgccatcaagtgagttataccactctatgttctgttatccttcagaaagctaaccgaacagtggcaatcggtgattccaatctcctcaatttgctgcttgcatactccgctagtcatcgtgctcgctacctcggtcatcccgagcccgccaatcgaatcgctcattgggttagcaaggtcttcccaacattgcgtatggcattggagtcatccaaggaagacatcactgacagccacttggccacggccattatgctgttgtcattgaagatcgtttctccaaggacattcgaggtgccgatcacctggaagagtcacctcaagcttgctcgcgatttgttccttgcacgaagcgagggaatggcgcatcccgggaacaggattggagcgttcttcgcccgctggctaggctatctcgacacgatgggatctttgtcatgtcgccaagctggtcctccactaatgatataccactccatcttaacggcctgctccgcgcctgacggtcatgacgaattcggtgttgattgcttcactgggttcaccccccgcactggagtatttctgatccgtcttgcacagctggtgcaggaatgtgacaatcaactcttcgacgaaatgggtaatttccggcatgactggcatgcatctgcggaaatggtcctggaagcgcaatctgtacttggtgttgtcgatgggattagcgaacgtgctcatactagcccggaacatcatcatggtgttgagtcctcggatatgatagccatcgaggaagctttccggtttgcaggtctcctgcatctccatcgtcgtgtccttgggtctccgcgtgactcgtttcccgtgaaggaggttttgcgcaagctgattgatgcccttggacgtatgcgccctggtgcagctactgaagtctgctccttgttcccgctcttcacggctggttgcgaatctagagatccagttcaaaggtctcagcttttggaccggttctttgtattggagagttcgggcatgaaacaggtacgcttctatactagtctgaaattcgttgaaagagtttgctgacactgtattcactagattcaaaatgcacgtcaattgatgcaacactgctgggatgaagacctgccttgggtggccctagctagcggtcagttcctaggttagagtcgctttcggtttgaacaagtgggtggactacgttgattcgcagacgccatgtgctcatgtctggcaatgacctgagctgggatgaagcattatttagtatgaagatgtgatagattaataatacccctcgccttctaaaagagcgagatacctaccgtgcgatgcacttcatcgtttgccgtttggcggattatcctacaccttccggccttccactatatataaacgttactatcctcttcttgtgccggaaatgaatcataatgttcattctacaactgactagcttcttgcattacacaagccagaagtcgaaattgcacagagcaattagttctaacttaacttatatccctaggatatcaaatagactacagtattgtccgatatatgccaagatcgaaatctacgactccgcagcggggtgatggtgatcccccagcttctccacaccaagccagttcagccgcggcttacaatgtaggctctgttgaagaatatagccggagatggtgtataagagtgcgcacttaagatcactatatctcttgagcaagaacggtatacttcccaatagccatcatgatctccgatcccagccccattgagcttccatcttcttacgaaaaggttgaaacaaccggccatgttgttgtctctcactaccccccaggcacgccggcagtgaccccagttgtcatcgttactctgaatcgtcctgctaaacataatgcgttcaccccgcaaatggtcttggacttcgagaggctcttccccatgttcgatgtcgacgagcgcgtgaaagttgtcatcctgacaggcgcgggaaagacattttgcgctggtgcagaccttgatattggtttcggtggtggtaaaggcaggacggtagaccatcgtgatgggtaagaggacatccaccagacagcccgccgcatgctctatactcttgctaaaaaaaccccccgacacagcggtggaagagtctcactggcaatccatagatgccgcaagcccacaattgcagcaatgcaaggctcagccgtcggagtcgggatgaccatgacccttccagcaatcatccggtagatcaaccacatcccgaaaacgattccagaccccttttatttaacatacatcccttctaggattggctatgaaaaaggaaaatacggcttcgtcttcgcccgccgaggtataactctagagtcatgctcttcgtacttcctcccccgtctagtcggttactccaatgccagctacctcgtcagcacgggggcagtcttcccccctacatccaagcactttggcgacctcttcaatgagatcctccccgagccatcgcaggtcctgccgcgcgctctcgagctagccactgatattgctgagaatgtgagcccagcttcgtcgtatctcaatcgggcgcttatgtggcgcgactctggttcggcggaggctgctcatctcgtcgagtcgcgagtcatcaaccatatgtttggatcggagtaagtgagatatatatgaacaagctggttgcggatacttaatatcagacagagaccagaaggagggtgttgcggcgttctttgggaagcgaaagccgaacttcaaggctaaccttgatgataacccgccgccgagtgtgccgtggtggacagaggttgatactggccgtaggcctaaagcccaaaggccttcgaagctttaaatccaaagctgtcattggaaaggtaaataatgactgaggatagcgctttcagggttcgtttaattcacacaagaccttcgaaggatggaagtctcaacaaatgtcacgaaaaatagctataaattgaccgtgttatcaaaggtcgttcctaatacattgcaattccccagctaccaagaccgctaatgatattgtaacaaaataaacaccagcccggacaaaaaaaaaagtcaccagatgtggttttgaacagaagctccaagaggttccaccatatattgacacgaacaaaaaagaaatgctgcaatatcacaagagcgaaaagagagaaagaaagagtctacgcaatgaagttgcggcgcttgcggttgtatgccctctgatctttcagccagtttcggtagcccgccacgctaccaatcttctcgccgtagtaatcgggaacagggttggcgatggagttggttgatggatcaacacggaaccggcgaatacgatcaaagaactctttctctttctgcgcaacgaaaacaaaacacattagcacagaccagacataagtcgccactcgtttgctttgcaatgactcaccgtgttgacagagggcttgtacttcctgtacacaagtccccaaatcccatttccgagagccggtcccagaagccaaccgacagcaccgcatgcagcggtcgccaatcccaggacaacaaatgggtcgaggcccataactgtggcgccgagatgttcaaggtcctggccagacagaatctgcacaccgacagtggtgctgatagcagagctggcaactgaggagacgagagagtatcggcggcgggaagcgcggagcttgaagaaggtgtcccagtcgagcttgacttcgtcgttggcaggtgttgaggtcgaatttgcgcgcacagcaatggttgatggcaacgcagccttggcttgtggccggaagtctaggttcaatgttgcggcggccgggcgagttgtcgtggagctaagacgtgtgggctgtttggccatccgggcagttgtctggggaaggggacggagggcgctggcgagcgagggcgcagcggggtttagtcggccaaagaacatggctgtgcggatggacatgctgataggattggcgttcattttggggaggaattggaattgatctaattgcagattccttgcagaggtgaagtgagaattggagccctggccctggaggtggagccgggttatgtaagcgtaatgggcccgcctaagggcgaccgacatcatcacgatctgatctatcatctgttaaactacttgcagtagatggagattataatgggccaagattacaggagagaaattgaggacgaagagaaagattgattcttcaaaacacaatgagctatttatagccatttgaggcccggtatgtcaagtattcttcgaggctaaatatcctgtttgacagaacgcagaatcatggcagttattggtttgatgagaccaaaattgtcgaatcacggcagagcaaattggcctcccactcaaagaggagataatagctgatgtagggtatcgcactctgattgagattcgagctttttgagcctcaaagcaccacatcgaagaaacactatcgcaatgtcacttgtccctggttcaagttggatgcagcatcatgtcaagtcactagtgaggtgtagtgaataggtagccagacgatattgacgaggcgcccgagaggcaggtcagtaggctatatgcatattctttgaagatgtcgggtgtataaggtaatataggcagtgcgatatataagtgtacttttgacccggggactggcaaagagatgctatctatatttgatggttacaaagaggagtggacaggtcggagtttcacaatccacctagaaggcttagcttggtttatatacaccggttaacacaggcctagttcatgaggcagaaatggtgaacaaataagagaatgagaccatttttgtccctgaacctggaaaagaccggaagtgttgaactgtaaacaatacatggactgcttttaccaggctatagtcttttaatggccagggcatgtgtcagaatgggccgtctgccagcttggcttctactgttatattcacggaatggtgtgaaggctggtcgtccactggtcaggttgtggcgagcatatcagaattccaatcatggccagctttattccaccgagtcaatataagtctattttcctattcgattagagttctccccggatcgacatagtaagaggctgaaatggtgcgcagctcgtttaccgaatacgttatagattcagctgaataaaggtagataaggaggagagaaagaggaggagaagaaaaggaaaagagaagaaagaggggggaaggtatcacctcggcaacggatatttactcacgcgttagtcaaagggttcgtccggcgtactggttattccgtgctgaaagctttacaatacactgtatcctggggcctgaaagcggtcagtgttaaggctaacattaggccaaattaaggccaaattcaggtactaaggccacaatatactacattaaatccgaaagtaaccctggcacctatgcccctgggtagtctgggtatactccattgtaaaatattcagcaaaacccgtggaaaaatcctttgttcctggttgcacacgctaatgcagactaatggtctgagagtgttttcgtttgaccaatagccgaaatgcctcagcgatcgggctagcggcggggtttcctgcccaggtgccaatagggctgttaaaatcacttgaaatttaaaaatatcgtttcaatttcaatttcaacgctaaaatattatttcatttcaaaatcggtctatgcctcaggcatggacccactcttagtagtccaccaattagataccttaatttttcagagagccaataagattatcatagcttactctaagcctaattaggccgaatacaggctcttacctacaccgcctagtattcttcttagaccgcctacgcttatgtagcgctagtccgctagaccacgtagagtgcaatgtataggtcaaaaatatatctctggtaatctaggtaagaaaatgctccctgtagcccctatatccggccaccccgtcctacttcaggcactcttatacaaggccgaactatataccgacgacatctaattatcctaccctatatctatagaagacttacagtcaaagagtcgctctgagtaccactatcgccagtaccaccatcgctagtactaccatcgctaacactactatcgctagccctactaccgccagtaccacttcccttactactatcggtactaccggtaggactatagggactattattattatcattactctagtcgtcactcttactatcttaatggtttagcgggtttgtaaagggactgtgtcgctatacgcgaggactagcctctgaataatctatagggcggtatacacagtagaatttccttccctattgttacctaaagcgggtattacagctagcgatacctttaagtcggtcatagaaccagtctactgaggtatagttacctctatagctaggcttaagcgcgaaacgcagtcgatgctattgcctcgaaatcactaggcgtataatcgcattcttacctataacgattctactgtattcccttcggcctatcgttagtagctcgaagtacccagtatagaaggtccggaaatgccgatatatagcggataggttattgtatactatactatatatcatatcgctatcgctagtaataaccgggcagataccctagttaactttattctatttaagtattgggttcggcggtctattactagaagtaagggtaagcctaagctctctagataagactttaggcggacgttatcctacgcctaggcggagttagtagacggctagcttctaacctaggttagggtcttatactaggcctatatatattcagtatatattaggaagatataaggtttttgacttactataggtgtatccctatactggataagggtttacagcattccagactttatttgaagtaaacgcgcgataggaatagctatcggtagactagaagactagaagggctactatttttataaagataagatatacttaaacttaaagactaagaaaattttagaggacttagaggatagagattctagagtagaaaggagagggtttataactattctattaataaagaagtattccttctacccttctaagggtatttaggaatatcgctttctattaccttcctaataaagaagaggtctatatagaattctttagttctttagttctttcttatatataatactaatattataaagatactcctataataagaatctccctttattactatctaaccgtttttagactattagttataagcgactgtactaggatatttttataaaggagagttagaataatattaataacttttctaataggttgatctctaggtttaggataaagtactttaggtatcttagcgcgaagatactttatagaatacttagaggatagagtggttagtattttttattttttccttatagcctaggtcctacagttaggtagctaactctacccctaattctattatagatctaggttaaatataacttctactctgtatcctattctagaaatactatataaattatcgactatctaaggggaaagtataagtaaatccctactgagatccgtataatctttattaaagaaatgaagaaaggtaaaatagcttaaggacctattagcttttaaggttagggcagctatagccttaggaaataaagggataacgctctagctagatagctttactagtctagctagctattcttacttatagataacccgggcttctaggaattctatttacttatagatagtacttataagctacctactcgctaagctatcggtactaaactcctcgataaacagtttattagcctttagaataaggttaatataagattaaagataatacagtacctcaatcttacctataataagtcgaccgataaaagtagataccgaatctttaatatcttattcagttctcggtcctatagtatctattactatagagtcgagattaaggatataagtataataggggaggaagttactagcctagtctttaagaaggtataggaatacctaatctaagaaggtaataggttacctaattagttctatattaactctctagctatagatatatacaaggtaatgaatgtctactaccgactactcggaatataacctaagataagttatatattttatatcctatataacttgtacagcttccagctccttctaaaggatatcctcctgagaagtgggattaaaagtacatttaagatagtatcagagattgtattattctttaactcagtacctctacaactaaatcgacttcggaaacactaggtcgaaatctactataagacgtccgcgctcctagtgtctataataatacaatagggctcgcaatttaagatactccgcttagttcttaaatgccggtaggccctcgagcgctaggcccttaatattaaaaaggacgataggggtagagggaaaaaagccttaattgcctctaccctattagaacctaccttttaggcggatctcgataagttaatccaactcctagagctaatctataaggcacagcttatatccgaaagctaggtatccgatcttataaaagtaagtctattatatacaaagtctatatataatatatacgaagtctatgtataatatatataaagtatatataaaacctttattagcctttattctaataaagataggttatttcttaatagattttaatccaggagtaccttaagacctatatattaatgtcgaaatttcgactaattatataggaatacctagaggataaaagcctaaatggatttaaacatcgatttaaccgataaattaagccaatctactggcttacattttatcttcggctatcgacagctatctaggatctatcctttcccccggtactttaagagccaataaatacacttatcttaaagtataggggagagcctactaaaaagcagttctagcaattttagaactggtaatagcgttttttccatgctgataacggtggtatctagtctaaccaggacctagaggacttctagtataaggcgaaagtattcgctccttagcttactaatcttgccttacgtatctataatactacggctaatttagttgcctcggagtgggcattttccgctataaactttgtttactcgaaggtacgcaattcgctttcacccaagaaggttgataagctagtctatctccggataaactatcgacttatgagtaaagggcctatccagcagcctgacccagaaaaggtataggattagatagaccggtttgatgaggagtagattatcagaaatcgcttcttccgggatatgacttctcttaagcctcagactgaaagccttagtctaggaaatgagctttctgactctgagtctactgatgggggtaggtgtattataatgagtgtaaagcgtccttatgacttgtgtaactaaaaatttactgccagtttttctgccttttttttctgcctatcagctagtaatacctttaaatcggttatagaaccagcctactgaggtatagttacctctacagctaggcttaagcgcgaaacgcagtcgatgctattaccttaaaatcactaggtatataatcgtattcttacctgtaagataaggagtagattattagaaatcgcttcttctaggatatgacttctcttaagccttagactgaaagccttagtctaggaaatgagctttctgactctgagtctactaataggggtaggtatattataataagtgtaaagcgtccttataacttgtgtaactaaaaatttactgctagtttttctgccttttttttctgcttatattacaaaacattaccaatatattactagcgccttagcgtgaaacaattgaaattatattttaaatttcatgaaaattaaaaatataatttcaattcaagattttgaaattcaatttaacagccctaggctgaaaggcgttaaagaccgaacagactctgacctcattggcttagcgcggaaataagtgcagatatatatatgagcttatagatagagcatatagaatatagaactttggagtataaaatacatagacatcggatattggatagagataactaacaacataccctattaggtacgcgaaaaaaaaaaagtctgtcgtcatttggctaattgcgaatttctccccaccacagcttccttttccccgtctcgacttgccgcattcgaacttccccaattccccaactcaccaattttatcctcttattccgtctacaccatgtcaaggaacatttcttacggccgcggaggcgcaggtaagtgacaccacccttcatctctcgccacacaagtccactaaccacactacgcccatgccctaggcaacataacccgggaacaaaaagcgcccgaacccaaagacttcatcacaccaacaatcaagcaagaagtctacacgacaggtcgcggcggctcgggaaacatggtacacaacgatccggagcgaccagagattgcgcgcgagagccaagacgttgagtcaccgcccctgcgcgctcagcagatcccccaccacacaggccgaggtatgttctgcagatgacagtatatggagcgaatgcatttttgcaaggtcgtgacaggtacagctccgctaacggatgtgctatttctttccataggtggcgcggcaaacgcttacatccccacccctgaagaggaagagcgcgagaagaagatccaggagcaggaggcggagcttattcgcgtgcgcacgcagtccaaggaccgtgttagggagatcggacaggagaggcaggagctgcggaaggagtcgccttcttcttaggttggttaccgggggtggactttggttcgcggttgattcgttctcgttaagagggctcgatgaaagctgatggtattggctgcggaggagatttgcctttcttgggctgcagtgccgatctggtaagaggtgatttgtccgagcagaaacgaatcagaaccactgcgggcagtgctgcttcgatgcgagggtctgtttttttgccccatcgacctaccggttggacttatgggtctgtggtatttgcttttctttcttttcttttcttttctttgcgcggctttcccaatcggctttcccggcttcacataatagggaattgcttcatcatacctatcgtggaataccgggagaggaacggcgcttgggatacatttgggcgggttgtgttttccctctttgacatacgtttcgatgtgtattgcaacgatcctctgtgtttttcggaattgcttcctaaacaccgagaaatgataaactcccatgacaagcgatccttgcctcaattgaagaaactatgctatgtacaccaaatgtttatgctaattatacgcttcgtgtctcattagatgcatcgctcagcccaaccaagcctttgaaagagggcaccaaagaataaaattgcagactcgccatcaacagctaagcgagcactcgcgcgtcaatcctcggaaggaaacaccccgtcgcatcaatcggccagtttataagatcttgccagttcggatcaagaatgtccccaatctcctgcagaatcctatttccccaatcgcccatccaccatgaactcctaagattatgcagaataaccacataatgcgccagaacaacaagcgcaaacggccggcgcaactcgagtagctccagaaactccgcagggatacggaaactccaccaaaacgcaaagaccttgggctcgccgcccttcatcagcagcccgagcgcgtggctgagatgttcaatggccgagtcatacagatccgtctcgtgcgtcacatcccgcataacctccaagttattctgtcgctgtagcgagaggatcactagccgcgacatgtccggcattgttgggagcgggtcttcggggtggaagagcgggtccagctcgctcgccgtgatgcgttccatcgaggccactaggatgctgactagccaccgggtcagctggaatacctcgaagaactcatccagcacgtcgggctggtcttcgtccgagtcggtttcgctgtcgatctggcagaagccgaaggtgaatacaatcattatgcaacacagtgcgaaggtcgcttggatttcttcttccggggcgtcttcggcactctcgatgccgaggcctgctagcgcctgcgcttggtacgagcgtgctgtttcaagatatcgccagcgccgggaagatgtactggttgaggcgaggtgcagtgccgagagggctaggataccttggcgaaggcctgtgtagcggagagaaagctgggggatagttgtttgccatattcgttcggaggtggggttcccagccatggatttgtaggttgttgtgcaccagtgcatcatcaattcgaggtctttcaggtgaagggtttcttcggtgtgggttgagagacatggtgggtgctcttgtggctgggaatttgactgtgaggttgaggaagtcggagatgatggcgaagtgctagttgaggggataaaagagccacgcttgttgtctagccgagtcagtcggggccgaggcggatattggctgagcatcttgcgatccaggcagtgcacacaggtcgagctctgctccttatactgtgagagttgcattagcggggaggtgcgagagataggaaacaaaggagaaactggacgctccagtctcattatcaattgaaagctctgagaaaggcccagaagccctaagcaggggtatcatactttaacgcgtcggtcactttgcatactcgtctggcgtcgcttatttgaccaggaggatttcgattcgcataattgcattgtaaaggtgccaggctcgagacctcgaatgtttattcgattcgggggttgctgtgtatttgactcataattcaacctccagggatcccccgaaggaggaggaagaaggattttctgagatcatgaaaaagtcatatcagtcataggcccaagcggtgggtgtcgatattttgatatgtccattttcagtgccaagtcggcattccaagcaccaaagaggtaaaagtggcgttgtttcctaaatcggtaaatgcaggatggctcgtgcttcaaatgacataatcatacccggcgggggccgtacttcgtcactccgatggatttggtatgtttaggagtacggactactacagagtacatattgcttaataaataattgagcacatagttagttagcaactaactacctaagtaatcagctcttgtatccaacattggaacctaggtccgatccctattgccaactcaaaactaacttccgatcttctcgtattccatattccaaaccgggtgtgaaaattactaatgcgcgatatacccgagactctatcctagaagagcatacgcaagctagatcccgctagatgcactactagcagcattttaatatggaaaaataaacgaaagacctcggacaaaccccactaagccccaccagcccctagaaagagtccacactagaccctcttcgggactagccctatggggccggccaagtctatccgaaataagtttcagttgacaagcgatgcttttccccgatcggggaaagcgcatgcgcttgaacccctgtcccatgcactttatgcatggacacaatctcgggtacgtatctttctagctcgtgatctctccatgccctaagctcctttccgattagcaccgtttcgccgtggctccttggacggctggtttcttctttgggaacgggaacgctgtccaggattggttgtcgcaagtcatttccatagtcggacaattcctgaatggaagcattgcaagggttagattgtattcgtcgatcggatttgctttgcttttactgattacagtcaatggagccctttaaggtgattactgcgccacttcctaggccccgagatgctagctcgcacgcaatctggccctgtcgggctgatttgcgatccgcttagccgcgaagcattttctttgtttgggcttggggaccctgccgactggggttgctttagcgttgttgagtaaatggcgtgatgatcatgattcttgctgttgactgaactcggagacgcgcatggctagcgtagaccgacttttgggatttgacttcggcgtcccgactcgggtttaatgattacgaaattccccggattcacgctagtcgttgtggatctcctcgggtttatcaagcgagcagttgttgtgtccgaacactaatagattgggcatttgacaagtgactcctaatgtagtagcccgcatttcgcgctgataactacagtccgccaataagcgcattctgctgtccgggtggcgtcgatcttagggtgctgagtgccagttcatcggtattctagatctgaccgaggacacgatgtgatgccacgtcgaatgtcatctggcactgaccctttttggtaactgcgcgaggtccgcacgggtagaagcaatagtagctgcattagaacaagggtccagttagctagccggatagccggtgactccgacggacgattcgatatctccgtttcagaaatcgattatctgatcgcttaggcttactgcaatgtgcgaaacagaagcggaactccgcggagtgatgtgatcgccaaatcctgcacataatccccatccctggtgataacacttttagggaaattcccggcgattaccacttggttgcctgccaaggtgaggggggtgatccctgcttccttgtttttgcgttgatatcgaaccccaggcctcactttccgacctgagacttgagagatactggtcctgatgataccagcagtgccacttgatgtgtttggcatgctgcaggacaaaaggcgtaattcatagggttcgtgcatccttccgctcaaatttgtatcaagtgtcattggtctgcacaccgatgttgggctggatactgcgagattgaagtacggtggcggtctggccagcagacacattttcatatccttgggttcttcgcagtggcttttcgacggggcgtatatgtgtatcatttttaggtgtatacgtgccaggtctctaccactgagaatggtaattcggagggcatatttctgatacactgcacaccatcatgactgagattgctgttggtaccacctgaaaccctgagtcgaaaaagtgcaaaatcatctgggggcagacaggtgtaatagtatcgtaagcggaaacaaactaacaggttagcagcatttctcaaatcatccgaagggtaggtacagtatgaaatttggatttgtggctgatgtcttgctatagatcgcaacgtcggggcgaccaatatagaccagccgatcgtcgaggccgtagctccaggctgtttgttagaggaatcagaggaaagataaagggtagtgttggccagttcgtgccgtaatagttgccatacggttggccgtgtaacacaacttggctgacgcctcccgcgatggcacgatcgactgacaaagatgcctcgggggaaagtcgtgtgacttcactccaatatcacgacgtctattttaggaaataacccaccttcatgcgagattttggcccggggaattggcgatggtcttcagagcgcttctatcggggagcgagggcatcgacatcgacgataggatcacatataagactaaagactgctgccaatgccaatgagaatagtaatataaaatccctactaaggccaagaactagcccggcgaaagcctaacgtgggcctactacggaaagagcacgactacaacatctgctcctatccaaagtccccatcgagcggcacgcccgcttacttgcgaacagttgaggccagccgtgcgctgtaggattatgttgccgctcttctagaggcagttctttgccgagcgaaggatgacctgtggtttgggtagcttgcgctggcctcacgcacggcgtacctcttgaagatgacgtcgctgcctgcgtactcgaggacaggtcgatgagcatttcgacatacccaggtttaaagtgtagaaaaaacgtcggattgttgtcttagatctatagctgattctcacatgacccgaccgcaatattactgcatctcctttgacagttcagaggtcatgcgtgaatccgaccactttagtcaaatacacttggcgtgcgagtcggttagatgatagactgccattagcgatgaagctttgctaataggccggtagctgtggagagtaagcccccagtcgggggtcgggtggcgcagaagaagccccacaaggattggccattggcatttgcaactgcagtatgttgtagtattgtacaatgttgtctgtgtggacatcaccttgagatggaagcctcgtacctttcgtggagtgactactgaatcggccgcttatcccagctatgatcgataccagagtagatctcaattggactcgagtacctgcagcgactgtcacggtaatgccgacgactgatacaggtagttttgggtgagatggggtgtccacgacttggctgagacggtgaagatggaatggaggtgtaggaggttggtgacggtgctgagttgggtaccactccggggaacgtgcacgccaacagattaaacgccacacgtcgacacgagcagacagaattgaatcattgcttaggattagttctgttggtcaattgattctgatctagactcaaggagatagcagaaagatcatcgaggtatagtcggagtataaaataaaaaataatctcctggcgtctatttgtagttccgagagaatatctggccactgtcgaggtcatcagagtatgtacttttctaaatatctattcgctttatactagttattccaacatttattatgttccaaggtcaaaagttccaaggtcaaatgttcaaagtcgaaaatttccgtttgcgggttatatgaagaattccgaatgcggactcaaatttcgtcccattcgtcagttgtaacccgacggtttgggtggttcctgcagacaacttgtaacctcgtcgacacctcgaggacatctcttttttgtcttctttttctcttcggtcttcgcttggaaatacttttccagtttcctatttccggtacgtgatatatgggatatgtgtgagccgtggaagcctcagcgaatctcccgcactttgacagcgtcatcgtgcggttgacccaagaaagaagtcttatagaagaagatgatgctaacatatcttctgtcaaagaacaccccaggactctaatatcgccactcccgccctcctccgagttcattctacggttcgcgaataaaactctccgactctttcgcttcgcattttctgcctgcaatcggattcttcacgctttggactgatcggcttggatcggtcttggtacaatcttggtacaaagttcattcaacagacccgctgcgttctcgcgccatttctttgttcagccccggaagtcgatgcttcaagtgtgacgtctgaacatcccgcggggtcgcatgtcgcatctccaaccccccacctctcttctcgaacaaccaggtagtgaagatctatcaaaatagacctataaccccaggaacacgtctttggtctatcaagaatcatcctcggttccttacaatccggtaccatgtacgccgtcgaggatagacatcatcccgtcccagctccgctctcaatggatcgcatctctgctccgaccgtccagtacccgtcaggatccaactcgctgcgccaatccgaccatttggcacccgtgacaaactaccaagatggtcgttcctggtcattacaagtggtgcagcagccgatccgggctcgcatgtgtggatttggcgacaaggtgggtgatttttccgacataattattttaccacctcttaacacacttccaggaccggagacccatcactccaccgccgtgcattcggctcattgtgcgcgatgcgcaaaccgacaaggaaatcgatatcaagtatgtcgaaccagcaactctgcacccctcggctttctaaccatctcctctagtgagatcgatacctcattctacgtgctcaccgtcgacctgtggaatgccgacggtaccaacgaagtaaacctcgtcaagcattccgccacctccccctccatctctaccgccatgtcctcctcataccctcccccgcctcagagtgtctctccgacctacccgggctacaaccagaaccagtaccctgtgggataccccccgcagatgaacaactactacggtggtcagcaggtggcctaccaaaatcaatacggccagccagtaacgtacccccaatactactccggtggtcaaatgccaccgtccatgtcgcccgctgcgcagccggtctctggtggaggtggaccgggtggcatgttcactcgcaatctgatcggaagcctcagcgccagtgctttccggttgacagacccagacaacaaaatcggtgtgtggtttatcttgcaggatttgagtgtgcggacagaaggcactttccggtaagtctggaataacgggggtcacacgacctaatcgctaatcaaaatccagtctgaaaatgagcttcgttgacgtgggtacctcgtctgccgaaactaccaacggtcccccggtcatcaatcacggaaccgcacccgttctagcctcggtgttctccgaacccttccaggtcttctccgccaagaagttccccggtgttattgagagcacccagctcagcaagtgctttgcgctacagggtatcaagatccccattcgcaaggatggagtaaagggcccccgccgaggtggagatggagacgacgatgatgaaggcgactattaaaagagcgatatttgatccatagtacttggctcaacgtattgtctcacctttccttacctttactttttccccgccttgctatgaatacgacatgggggatggtggcgcgtggcttacggtgttctgggcaagactcgggcttgcaggtttctatattgctacacggactggtgctggggggttttctgtttggttttgtttcttccgagtattattcttccccttattcttttgttggcctctggctgtgtctattcatatccttcgcggccgattgcccgcacgtacatacactttttcttttcggtgaatcgaggtccggttgaattgctgaatgccgagactgtctgcccatagaaaaaaaagtcgtttgatatccaatacactgaggttgtttagttatttgtccgggtattgctctaatactcgcctttggtatcaacaggtgtaggtggtttctgtggatcgtagccttgtctcacatggcgttgtataagagtatagtatacatccaatagttgtgggtcaaaatactatatccattcaacatatctcaggtttcagtctcagtctcatgatgctctacagtctaaaatgtctatttccactcaatacttgaatatcaataatatccactacccagtataacctaccatatctcacatgtcttacatgtcatcaaaacagcatgcaatcatcaagaatcatcagcttacccacccatcttccatcaaattctagaagacaaccagcacatcttacacagcacatgatccacaaaggacagcgtagtacaacaaacccatatccgacaacaatctcgacaattcccgcccaccatcggcttacagaatacgtcacaccgtccctgaaagccgaaatacaccggacctgacagaaacccgacaacaccggattgtccaacccgagtctcccaagccatacaccaacctcaacctcaacgaactccctacgtcggacagtgtacaacgcccgtgaaacggaccgacctaagccctctcctgacagattctaatcacccacagccaggaaatcctgacagccctctgcactgcatggtatctgcaaggtaccacactaacacacgaggtctcgggtatgcgcgctgcagcatcgttagatattcttattagatcgcagctggcaggcacaagaccggatttgcatcagggtcttcgatattgccagattagccgcagcaccggcttagtgggctgcagggtccggtgagacattgcatattgctgcaggttcgccggtttaggttgggcgtcggtggcgttggacggtgtgtggttatcctctcggaaacgaggttcctagaattttcttgggaatttgtggatgcgctgatgtatcgggccgttggtgggtcgagggttgtttttctggggaaagtaagaggcgaggtatccatgacgatgaatgagatattagaggggtttgaagaacgaataacgtatgatgtagaggtccttcgtataatatttgcgggttaagccgaccgttgatacctcattggcatggtgatgtggtgattccaattataaactgagacaaaagaagagatcttcacccgaactccccgattcctccaaggttggaatgcagcagataagtatagagtacctgatgtctcagactccatgagaccccgccacctctcggccaaacccgacagtcaatgacggagaagtcccttgatctatgggtttccctggttcggtttctcggatgtgctgctatttatattgccctcccctcgtctatataaagaaaggtacaccctcccttgattgtgactattcaaatcaaaacaaaacatctgttcagctatacaaaacaacctccaaccctccaaccctcaacatccaatccacaatgaagttcacactcacttccctggcactccctctgctggccgccgcggcaccagttacccagtcaactgccaacccacccttcagcgtgatgtccatccgctccggctcgcccatccactacctacagctgaacgccgccggtcagaagttctacctcggcggaagcacggccacctactgcccaacccaggtcacagactgcccaccgggaaaccaaaccgtcctcgctcctggcggcaccgctctggtaagtcacgagttacactatctcatgccaacaaacgtacaaaggaaaaccccctctaacaatgaacaggacaccatggtccccggcggccagcaggtctacatcgatcccaatggcgccctgagcttcacccaggctcactcagccaacatcccgcagggatccttgctcggtccattccactactctgccgatgaaccctgggctcattactccttcggctctactggtttcatggcttgtccagcggaagataaccgctggcaggtgtttgccgccattcaaaatgcgactgtgcccaatggtaatgttgacgagtgtcttgggttctcggctgtcgctctggattacactggggacgtgcctgcttggcagtatatctagattaatgatgtggtggatgcttaatgctctctctaccttgttttgatttcttgcatgtaccattattgactccttctttatcatggtccaggttggatttaataatctaataatctatctcatgcctttcgagttcagaggttgaatggtaaacatttgcatgaagctgtacttcgacacccgccgtaacgggccgaatcgcttcaggaacacccgtacacaaaatctatagtcagactcgaaagtaagttcaagttgatgggattgtgaaagaagtgtaacacttgtctcactttatcttaagctactaggatagaacaaagaatatatcacaagagaagggattgttacaggacccactacaggatacctacaatttgtatataaaccgctaacaaagttaagtcacttttatcacatcaactatttcaacaactatttcaaaaactactccatcatcatcgagagatctttgtttgctagatagctaagcgcgaaggttcgaggtttggaacgtttgcaaagggccagctatataaacaggctgcttcccactttgcaacttccttcttcttcctttcttcatctccattatctcgttagcggcgactttctgctcgccgtgaggcgccatatcgatcaacaagaaagagtaccttcaactaaggcggcttcgctattcttgaggaactgcgcaaaatggatgaatgctgcgatgacagataagatagagaactcaaattaaacaaccaaaaaatcgaagccttccgacagggccatctggatctccgtcaaagggccatctcaacatgggcacgggatgcattgcagaagaataccgaacgactgaaggaagagattcgcagactcaataaggatatcgtccacggtagcgatatacggtctgatgctatggttatcactgaacggtacaaaaaacaagtaccgcgtgaaaatatttccctactctgtacggctttactccagataacgtgaacaacctcggtattatctacaaactcccttggcactctttttattgctaatatgttctagaccaattggaatgtcacgcatccctacgggcctttggatcgagaagcttctatcctacttaaggacgcccgtgtaaggctccccgacgaggggatggagaacaaacgcgtgcagcttgttggcctactgctaaaggagaagtatgagaaggccgaggagatgagcagtactctgtgtgggaacgattgatttattgccaaagagtagtctgagaactaactttcttaagaaacctttctgatcatagttactacacaagaagtattacttaagaagtaaaaggctagtcactcctaggaagggtaataatctcaaataagaattatttgattcaagggggcagccagtgtaacacttgtctcactttatcacattaagctactagaccctccccgcctacgctgtctcatggggtcgagagggatgagaaaaagaagcgcttttatattgtcacctcctacgtgccttcccctacgaagtgactgttagggtacaataatctagatgttgtctacagtagagctctatagtgaacaaagccgtcaatacgcaacaattatattcatgaaaatgcaactaagtaacataaagggcgtctgcttgtggcctatgccccaggcaataggcagaacagggttcatcaatcaatccacacacttaaaaccaccatctaactatatttgcaagatctagtccgagcgggaacacctctcggagttcctatgactcccttttttatccaggccattgaccacggtatgcagtagcagccttgggatctccactgagtagataagcctatacacttatgatgtgaatcgaacccacggagggttgacttgggggttgaggcacccatgactccctcaactcgagggtacccacgaggtgctattgctaacatccgcatgtgggacattgtgctcgtcttggatgcatatcagacggcaaagacctgtaccagactagctgtctgttaagagcatgttttgggcttggggttttggactagatctagttccgccagatcttaatcgccttgtctttacctccactggcgatcttttgtccatcaggactccagtcgacagcaaacacctcatccttgtgtcctggaaggtccatcttgagcttgccggtgcgcaggtcccagatcttgagagtggtatccttagatgaggacactagcatacgcgaatctgccgagaaacagcactggtagactgcgcctacatggccgcggaaggtggtgatgaatctagggcgatgttagctataaatcattatactcaaaggactgaaacactcactttccatcacggccgttccacagcttgacgtggttgtcaaatccggctgaggcgatataagccatgtccggcgagaacgtgacatggtttacctccttttggtggcccagcatccgcgcgacaggcttgctcgaagtggacggctcccacagatacattgtgaaatcgtcactggccgataccaatcgctcgacaatagtgttgttcaccgtcgccgcctcctcgaacttcttgtgcgcagcagccaccttctcagcctcggtcacagggaccttgccagtgtggtcgtggtaggcggtgcgaagagcaaagtccgtcgatagcgcgaggtgattgacgcggtgggcatgcgccgccagagtctggagcagagtgccgtctttcgggttccagatcttaatggtcttgtcgtgggacgcagtgtagatcttgccagtaccaccccatcgcacacaagtaacagacgacttgtggccggtgagcacatgatcagttactctcgagacaacatcccacacgcgcaccgtcgagtccttggaggcggatgccaggcgcggccgccctgactcctgcacgtggtatggctcccaggccaaattcgtgatccactttgcgtggcccttgagccccgcacctagtgctgtcccctgctttgcatcccagaacctcacggtgttgtccatgctaccggtcgcgatcatggcaccgttcggcgagtatgcgactgccagcacccagctggtgtggcccttgagcgtatgtttcggagttccagtatcacagtcccaaacacgagcagttgagtctccactcccggagaccatggtggaggaagatactggggagaaggatgttgctagaattgcttcgccatggcctgcgatggaggccgcgcatcgtgaaacggctttcactcggaaaaccgcctgcggtgtgtagaagagcgataccgtatcttcggtggacttgatcccaggctggagtagcgagtggtaaacgtcgcggagaatgtcgatcgtttgttcctctttttcggaatggtaggcgaatcggtatggtactcgcccatcatcttcctggaaagaaatcgacgtcagtacaacatccaattgccaagaagtcacgagattcaaatcttacatttccttgtaatgtgttgaggagagtctccaggttcttcacattggcatcggcgactgggaccgagaccgcaggcccggtgggctggccggttgcttggtcgaagaattgaacgcgaacactacccagatcggatggaatactctcaatttcttgctgctcacgggccttatcagcctgaacgagcttttggcgcttgctgggaggaggatagagggttgacatggtgattgattttgaggtcgatgggggaagaagagaaatttcgacaagcaaaaatatcttgacgcttatcttatcggccctatcgatggatctactcgtacctggtacctacatacggaggacataagataactataactatatagttgactagttggttaactaagtagaggaaacaatcttaatcattataatcaaataaaacgacactggaaaccttcagatttatgtataggagggttactggtcacgaaagaagtgttggtaccctcggggccctggcttagtatcacatgagccctcaacccgtggactggaaccccggcctctaggcacaccctgccccatctatctacactctcttggccattagaattgagcttcacaatgtcggtttattcattaaattcatcaaattctctggattcctttcccccatcggcctctagatgtacaagtaaacgtccgaccacaagggccagcagtgttgcggcacaggagatcatctgcgccgtcagtgagtcgcggggcgtctcaaccaccgttggcctcgcatttatcaaccttgcgacagctgaatctgtgatctgtcagatatgtgacagccagacttacgtcaaaacaatcatcaagataggtgtttttgaacccaacgagatcctgttcatgaacaccgccaaagagtcgaagctccgttatatcatcgaagagaatctgccagatcccatcttaaccttcctggatcgcaggtggtggtctgaaaagacaggccacgagtatgtggaacggctggcttgtccacaggaagtcgggtcactcaagctgactctgggcgggaactatttcgcagcgtgttgttttgccgcagtatgaacactattcatgctgccgaaagaacgtacttacataaaaattaggtccttaagtatgttgaagtcgaactccagcaatcctttaccacgcattctcttcggatacgcttccagccgtccgaggggtccatgttaattgatttgtcgactattgtgtccctcgaactcatccaaaacctgcaaaaggcgaagtccaaggaaagtttgtttggactactgaacgagacattgacgcctatgggggccagactactccgagctagcatcttacagccttcgacagaacgagtcaagttgacagccagatacaatgccgtggaagatctggccactaaagaggatatgtttgtgtctgtgaggcaggcgctcaaaggctttatcgatgcagataaagtattgactgcggtagagtctctgaggctagctagtattgaagactcgtgctgacggattatcaagatcatcttggttcccatcaagcggacaatctaccatgtcgaacagtcagtcaacaatatcatcatgctcaagacttacgtatctgcgatcaaacacatcttccaggcgcttggagcagcagaaagcgatctactacttaccatacgcgaagtagactctacgttcgtttggtattttactcgaactaatgcattttagttgtgcgctcctgaggggcatcgttcaattgaggagctgattgacagaactctgaatgagcatgtagcctaccagtcaaagccacttgatctgagaaaccagcgcatttactgtgtcaaggtcagaactctacttctacattggatacagatcgctaacatgaattaggccggagttaacagtctccttgatgttgcgaggcaagcatataaagaagcgaatgcggacgccacagagatgattgagagattatcaggcatgtctggaattatggcatttcatggatcattctgacctatatcagagaattgggatatggtcttagatttgaagtatgacacagcccggcaatactacatctgtattcctgctacggaactaggtccgctgccggatgtttttatcaacgtgtaccgcaagcgaaaccgcattgaatgtcagacattggatttggtcaagctcaatcaaaagatcaccgattcccacaacgaggtgatcaatatgagcgaccagacgatccaggacctgatccgagatgtgtccgccgaagtatccgggctttttcgagtcagtgaagcaattgcaatactagacatgcttggagcattcgctcagctagcaacaaaatatgagtacatcagaccagagctaaccgatactctcgccatcaaggcggcacgtcatccgatccgagaacagattcatcgcagcaagttcgtgccgaacgacgcatatgcaacaccgcaaacaagattccagatcatcacaggttgcaacatgagcggcaagtcgacctacatccgctcactagccctggtcacagtcatggcgcagataggctgcttcgtcccagctcaatacgcctctttcccaatctttcaccagcttttcgcccgcgtctccacggtagatgatctaaccgccaacgtctccaccttcgcggcagagatgcgggagatggcattcatccttcgtaacattcagccacgcagtatggtcatcatcgacgagttaggccgcggcactagcacaatcgacggcctcgccatcgctatcgcgctagcagaagcactcatctgtagtaaggccatggtctggtttgtcacgcacttccaccacctgccacagattctcgcgaagcgcagcggtgtgatcaatctccacttggcagcagacatttctcccgatgaatccaagatgaccatgcattaccgcattgcagagggtcctgttccagaacgtcgatatgggcttgtgcttgccaagctcgccgacctcccacctgccgtcatggataaagcacactccgtgtcagaggcaatggaccacctggctaatcgtaggaacagcccggggcgtgctggtgctatttccctgaagcggaagttgcttttgtctctacgtgaacaattacttctcatccgtgccggtacaaaggacggtacaatggataacaatagtcttcgggatacattgattaaactccaggatgactttgcgatgcgcatgactgccatcaacagagaaatggagttatgccccgatgatgaaaccaagacagagcctcttagtgggactacttccaacttgtcagttcatgcacctgaaacccaagcgtcgggttcaagcaagagtgacaagggaatgcgggtgtcggagcccattgtcattgaatctgagtcggattctgggcctgaagataccacggacaatgatagtgtggtgttgattgaatgttgaagttaaggaggatggtaagtgaactgacctctttattatccccattcctgtagatcatatatgtatacttttatggtgacaatctgatgatttgacggggaattgaaaaccacattattccctaatatatgatatcagacacatgaagtgacaataacatggattacctctatacaatacattgtatctgcattcgctagtaggtacaacacagaagaacaagaaatctacccctacatggtatatattttaatggcgctccccgccatgcgatagccaacccaacttaggccaaatcaaggccaaatcaacataagaaacatgaatcaatctaaaagtgacagtgtatcaaccgaagtggaacagggtttgctttcccttgttcctctttccttttttgccattacttgagtcgtcattgctgggttcggccggagaggcggttccggaactcggggctgagccccatgcgttcggggcagggccgcggttatcattccaacggacggtgccgcgagtcttgccagccatgaggacattgggcttggctgctgcggggagagcagggaaggaatcagcgccgcgagaggcgggcgccgtgggcgtgcgactagaggatggtgcggcggatgagggccggctgaccgggctaggcatcgcaggacgagagaaggatggcggcggggcggctgctgcccaaggggtggcagcggaaggtttgccacggcgagaggaggggccagctgaggcagagaggggagggaaggggttggagggggcgtttgggagagcaccgctccttcctacggcggagcgggaggatttagcagttgatgacttcaagcgcaggacgcgcttgccgctagagttgacggcgcctgttgacatgccaggtaagagaccaccggctggaagggctggatagtcctcgttgatggcacgccagtcattccaggctcgcaggagatcggagcgcttagacgcgtcttcgtagatctcagcgagctccttgatgagcttgcccagctcggtgctagatgtatcgaataacgagaagaaggcatcgatgagctcggttgccgagatcgaagaagcgcggtagcttgatactctactacggaattcggcgagtttggtggcatcattgcgcaggaggttcgaagcacgttcaattacagcctcatggcgcattcggcgggtctggtcttgtgcggtagctggcgcggagtttgcagaaatattcaggccttcaaatgctgcagtaggaagaggctgagagcgcgacgtcgaggtagactgcactggggtggcagcggcggatcgctctggagcacgaacgggttggacgtcatctcgagtcagctggccgccaaagtttcgtgttgagacagactgcgaactctgtatagccatttgtcgctggtatgcaacttccgcacgagtcattggttgtgcactggagactggcagtggctcagcgttagggtcacggcctcgaccagcaccgcgccgctgacgttgctgttggtaaggagtgcgcatattatcgaattcggacaaatcaaccattctggcgtctcgccgaatgtccttagaaaggctatcgggatgtgcctcgatttggtgggccttcagatccatttgcgactcgaaaacgacaaactttttttccaagcattctttatccaggcaagcgaaatgatccttatggaagtgattttccaatgcgttgtagtcaatatagtattgttgttggcggtgggaggagcgtcggtcacagatgtggcaacgttcgtgtttatcgcggcagtgagtgtacagctcatcgtcaccatagaaccgttggcgacaaaacccgcactccggatgtcctctgaagccactctggtctatagctccaggctggtcgtcgccggacctttcgtgcttacgcaattccgccgtggtgaatagttcatgctcatgtgtaaagaccttcttgttacgagtacaaaggtcactattcggagtatacagtcagctattgattcaagaattgcgcgagcttgatatcgacataccacataactttgttgtgcttgctttttacatggcggtgcaaatctggccaccccaaacaggccacatcgcagtcttcgtccggacagttgtatcgcagcaacagcaccgtatctccgaatatctcgtcgctctcatattcgatgccaaggttgtcgtccgtccgagcaaagtccttcttgttgaaatcctcatatcgccgcactggatcatcagtgaagatcacgaagttcgattcagtctggtatacaagtcagcacatgaaatgtaactccaacgaagagcacctaagcttgttggaaaaaggttacaatatgatcataccctgcaatgagcacaagccctgttcttgtacagtgcacgcaaccgaagcgcacaaatatgacacgtcctatggttacaaggcgagaccgaggtatgttcgacggcagaagcgcaaataaagcagacttctccatcatctgcatcgtctgtagcctcttctaccggtttctttgctgctggcgtcgtggctttcgaaggctgagtatcttgattgttggttcgatcggtagtgcgagtttgtcggcctatatccccgccgctgccacgaccaccgccgcgggtgcgaggcttggggcgtttctctccatcgccggtattgtgttgcgaatctccacggccggagggagctgtccctccgcggccgcggcgacgcccaccgcgaccctggctggatgactctggtgttgaggcctggttgtcggtcattgcggaggaaggaatgtcacaatgcaagctacggcttggcgtcaatatcaggtgtgctggagctgcagaggcctggaaattgtggattgtggtgggggagaggttcggggaaaagtgagatgccgctgactgatcccgcatgccgcatttgataaggatgtgaggcctgcaaccgaccactctcttggtccttttgattacagaaaaagctcgaccgagcaattgagtgattcatggagcgttctattcaaggagtatggttttgtttccccattcccttatacaagcaccatgccagtgagtaaaagtactaggcagattcattggcttgttggcgccgacctgcttcatcaggtcaaaatatgatgagcagagagctaaataaatactgtttggtccatgtcaataggaagaccaccggctacatatgcaggccatggggttcaacaaagaaaatgagcatcagaagccacgcagagagcaaatatgatgtccaatgatataattgaccaggatcacgcatttcagtatctactgtctatatcggaaggatctccaattatgtatatcgtgtaggtagcagattccaggacctttgagactgtaaaatcactatggagggctacaccaactcccgctagagagcatgagcaaatcaaatccaaaagaaacaaaaatggcgagtgcaaattgctcggaattcacgccagcatccccatgcatcgcaaaaaataaaccaagaaagacaaaggagaatcgttaagaagcagggcttagtttggagcctgctcttccataaggatcaaagccaacctgtcactcccggactattcatcgggattgtacaaattctgattgagaattttagtcatagtgaacatgtggactcgatcttgcttgaagacagcacgcatagcattgtcgcataggatttgtcggcgatcactgggatcctgaagctcgttctcacgaatgtattgccaaacctttttgacggtttggggtcgcgaaagctgtatgatgtttagcaagcaaatcctagagagaaataatcggaagaggtgctcactgtgggctctcctagaagcgcggataggggttcggaaaggttcataggtttctgtggttgtgttagaaatggtgggaggcttgggatgatatagaaaagcatacgtggaacccagtatttcggttgacctccctctttggctcttcgccggagccaatatctgaatcgtcttctgccttgaccctcttcgaagttttggctttgctcttcttcttcacaggagctgcacgccgagtgttgcccccacgagtgggtcgcgcgcgtgaattctcttcagcttgcagcttggctgcgaatgccgcatccgcatcggtatcagtatccggcttgtgtttcttagcaggaggcgatgcgcttgcaggctcggaagtggcatcgctggaggcctggcgctttataggagatgaggagggaggcggggagggcaccgcagctgaagctgaatcaccatcgcgctgatcattgcttggggtaatttcatcaggcgacccgcccaccccgttttgttcggcgtaacgatcgaatcgttccatgatcagctgcttgagcgtagcctttgtgaatgtcagtcacagttcttcgccagtcatcctgaatatctttggggtaataatgcgccatagatcgtcgtaacttaactgaccttcatcggggtgagatcatagccgacggcatcctgaagacctttgcggattcgcttctcagagatggtagtgaggtcgcttttggccaaaataccatcaattatgtcgatatatttgtcgcgcaagtcagaggtcactattgcgcaagatcaccggtcagttaggaggctttctagagcaccggcaaattagcaccggggcaacaccgaggtagcttacacgacatattgttgctagtagatcacgtagcttggccagttatgttcagacgtatgagctggtttgggatttgcagttcgcaattgaggatatcgtggggtttgtagaggagtatggtggtcgatggagagcttggagttgtcaggtgggctatactcaagtcgcactggcgcttaagaccggcggggcattggaggcagagaaaggccaggcgaaaaaaattgcagagacaaaaggattatagataagatgctagacaaagaccaggtcaggcaaagagctccgtgcaagatatgcagtctaaaagaaatgtctatccattgatagcctctagaaacgtccataatgattgacgggcccgacctcaagctggggaaattatgactaagctgatgcagctccgtcacgtggtatcttgtgcctgaggcctaaagttaacaagtgctgactcagtgctgagtcagtccacacaaagaacccgcttggccgccgcgatttgtttctgcccgaaaatccatcagcggattgcaccgatctatctttgctccgaagcctctagacgccttcggtatacccatcatggcgcccagtttcgataccctgtccgagcaggatctccacgaggaagaggaggaggagattgatttctccggtgagtgcaagatttgtcgtggtctgtgtgcccctctctaacacattagtccacagatctcaaggagcaatatgaagtgaaagtcgaggagggactggacacatttatcgtcatcgatggcctccccgttgtacccgaagatagccgacaaaaactcgtcaagttcttattgagaaaactcaactccgttggcagcacctccgaagatgcggttttcatgcccgttaacgacaagaagatgactgaagggtgcgtattggatatctaatgagatgtggaggaatcatggacgatctctaaccttcgttcgcgcgatatagattcgcctttgtggaatatgaaaccccggaaatggcagtcgccgccgtcaagcagttgcacggcgtccctctcgataagaagcacattatggctgtcaacaagttgatggatatcgagcgttatggtcgtgaaggtcgtattgatgaagaatacaagccgcctgtcccggaaccgttcaaggagaaggagcacctgcgctcgtggatgggagatgccagcgcccgggatcaattcgccctttaccgtaacgacaaggttggcgtgttctggaacaacaagacgaacccaccggagaatgtcgtggaccgcgctcactggacacaacttttcgttcaatggtcccccaagggtacattcctcgcctccgttcacccccagggtgtccaactctggggcggcgagtccttctctaagcaaaagcagttcccccaccccttcgtgcagttgatcgagttctccccgctcgagggctacttgacaacgtggtcagcacggcccatccaggtcgaggaaggccaacccatattgacctacgaggaggacggcaagaacatcattatctgggatatcgagactggcaagcctctccgttcgtttgtgtcgcacgatttggctgcccctgcggatattgagggtagcgatgttgcgcctaagaaaaaggtgcagtggcctgccttcaagtggtcctcggacgagaagtacgttgctcgcatgctccaaggccaatctctctctatctacgaacttcccaacatgaaccttcttggtcgcacttccgtgaagattgagggtgctatggacttcgagtggtcccctgccaccgtcgcccgcgagggtatcaagcagtacgagcaattgctctgcttctggactcctgaaattggcagcaaccccgcccgtgtcggtatgatgagcgttccctccaaggaggttgtccgaacccgtaacctgttcaacgtttccgatgtcaagctgcactggcaatcacagggtgcctacgtctgcgtcaaggtcgaccgtcactctaagtctaagaagtctatggctactaacttggagatcttccgcgttcgcgagaagggtgtgcccgtcgaggttgttgacagtctcaaggataccgtgattaactttgcctgggagcccaatggatcccgattcgtcgttatcgccaacggtgaggcaccaactggtgccgccgtcctccctaagacttccgtttcattcttcgcgcctgagaagaagggctacactgccggtaacttcaagctggtgcgcaccattgagaagaagaccagcaacggcatctactggtcgcccaagggccgattcgttattgtcgccaccgttcactcccagaccagctttgacatggacttctgggatctcgacttcgagggcgagaagatcgaggctgagaaggatctcgcagccaacctccaactgatgaagactgtagagcactacggtgtcaccgatgttgactgggactccactggtcgttacgttgttagcagcgccagtgtgtggactcactcggtaagattttacctcgttctatttttgattgtgttacataatattgaccccattatagatggagaacggctggaacatgcacaccttctccggtactaccctctccgagaaccccaccgaaaagttcaagcagttcctttggcgcccacgccctgccactcttctaagcaaggaggagcagaagcaagtgcgcaagaatctccgcgagtactcaaaggagttcgacgaagaagacaagtacgctgtcgacatcgccaacaccgccgttgtcgagacccgcaagcgtgtactcagcgagtgggtcgcctggctccgtcgggagaaggagctcctggcggaagagaaggaggccttcaacctccccgaggacgcagattcacccacagccgccagcgacgcgcgcccggttgtcgaagatcagggcgactccgtggtcgaggagattgtggaggagattatcgaggagaccgaggaggtcattggctgatgaatctgtctgttctattttcgcaaataatgtgtttccttttgttcctcttttccccctatttctttgctggcgtttcgcgcttgtgcctgaacccagccttctgtccccttgtgtttcttttaggttccctgggcaagcccagtgaggatcgggacattacaaaaatcaatagatcgagcggtgcgcctcccgaccaaatgtgcaatgtggataagcatgagagatggctacgaaaccagttcctagcgaagttcaaccttgtacttcttattttaaattatttaaagtaaaccatctcaagagtaaagttctcaagtataaagcccccttcccacgcccaccgctcccaatgttaccagcatcatgcccaatgtcgagtccagcgcgaacctcatagcacctcccgtaggctgactctgacttccgatggtagtggatgtcgcagcattcggcgacggctcagtgatagacgtggaagaggactcagaagttgtggacgaagaagacttggttgaagacgaggactctggcaagacgttctttttgaagtaggaatcatgcaagcccacaacatttccaggaggtgtatattcgcaaaccacataccagccttgagcccgcggttcgcctcgcgcgaccttcagcccttccaagccatctcctccagcttcatccacactgaaacgaggcgtcatcaccaccccttcgaacaaatcctcttcgaagacatcatcttgcacttcgacatcgacatctcttttcgcattgtcattcttcgtatacccacagttgacagcggcacacccaacctgcgtagttgacttccagaccaactgagtgaaatgccccgtcgcctcagtgaagcctgtcggcttgtcgaagttatacaattcgccttcatcaccccaggcaatgacagcagcagagacattctggtatccgtatgcgaggttctcgccgtagctgctttcctgcgaaggtaatactattagcgctattatctggtagtatggggggaattgatacataccgaatgtttccagatacaggctgaggcccactccttcgagtaatcggccaaagtgtcgttccatttcagtggtttggcatcgtgattggcgcggtaatcgttcgtgactttcagcatatcgcccttgaactcgtccagggaggtgtaggatggtgacacgggggctgtttgtgttggcgctggcacttttaccgtcgtccagacggttactacgtcggcgtttgcattgagtatttgcacggtgaggagtgtaagaatggccaaccatcgtgtagttctggtgtgagtgtttcgatccattttgaagaattcgagttattgtgagcaggtggctattgcatgatctagctctttttttttttcttatggtcttcagatcaatagatagcaccagggtccgaatccaattcaggcggcggtcctaagccgtgacgatatccccttattggaaggtggtgatgcaataatcgtgtattgtctattgtcttaggcaaccataggtatttattgtgcgtgcctgttctgttctcatagaagctccttcagataatattcttcatagagcttgagaaacgaacgtactcaacacctggagggtgaagaagattgctgggaagactgggaagaaatagagccattttgaaattctattaatgttttagactgcaaccgggcaaggcgaaagttggatcccttcttctcatctccgtttcagccgctgtggtgatgttccagcagccgccggtgttgacgtcagactcttagggctacggggttgcatcgtatcgaacgtatttgatctttgatagttgatatttcatatttcgtattgattctttgatgtctggtttatctctatttctctgtgcagctagactgtctggtttcgtctggtttcgctttgtttcgtctcgctgaaactgagaattggtgacattattatagaacttctctacttctatgtatcaaatcccgcaaatatgtaccatatccttgtacatgaatcgctctttatatactcatagcagtcgactttccctaggagaacattccgtactgacatgcatgtccgcattgtagggccctatacgccactcgctatgcaattctcgggggtatcggtatctatttacatcaaattgcaaccaaatccatacatagctcgttccacgtcccgcttgacgaggtaccagtcagcccgccgctcagcaaattcatatacctcctccacacgccaaattccatggaaccgatccgcatccgcgatgacagtcgccagttccttggcatggccaggatcgatcaagtaaatctgcacgagctcacggaatgccgtgaaatagagaagtagctcattgtttcgcaaggtttgaatatacttgaagtagtggttcatgtcgctaggaagtcaagtcagcttgctgttttgcatggctgaagatcgagatacatacctgatcaacttgagtgatccctccacactgatgcgctgtcgcttgaggtgtttacatagagcggtaaataagcggagcccaacttcttgattaaacacatctagggtgctcttgtccgtgctcccgactagcatctgcgtgtgcgatgaaaccacgtcgacgacagcgacagcgacttcgctgacgcctacatccatagtctgtcggtggggatctggggaaactccgggattgaaatcggtggctggctgtcgggttgccaaaatgtagtccacctcttccatgagaacgtcgattcccttattcaggccagctgcgacacgttcatcgagcatctgttcgaactttttcttttctttattggcagggtccacgaaatcgttcctatcagtcaatctcatgccgatcaactcctgctcgtagaatacatccatcatttgcaggatcaaatcgccgacgttgaccagttctaggaaagtgaccaggggctcgaccccagattggtcacgctccccttgttcgcgaggtcggtagttggatagatgactgacagccttatcgaatccaacgataacgtgctgatatcccaatatacgtagcaatgttacaaaaattgcctcgcattgttgctttgctgcaagaccaaattcgccgccaagtcgcacaaattgagcggctctctccaagctagacttggcggaatgaactagatcaagtgcaatttcgatgctaaacagtgagcggataccctccatctttatcttcatgatggccgcttttgctgccagctctgtagttggagcttcgtcgacggccactggggcaggcgacgatattgtcgagaatcgattggtatttttagatggttgcaacgggtttggactgcttgtttccgtgtctggtttggattcttcggttgatttggcactagagaaacccggcaggatgtttaccggcatcatgatcactttcttgaaagaagtaaggaagtctcgtttgtcggcttggcgattgacatttgacatcaaaaaagactctgttgaggccgcttgttcggagagatgccggtcccactcactcactgtaaattcacaggccttcttgaaaaaatcaagctcttctgccaaatacagatcgaggtgtggctcgtagaccttgatcacgacattatcaagatactcatcgaatttagcatcggaccctcgtatgggaagcagagcctccgagaggttcatgcattggacaaaggtcgtcgagattgcagtgagatacgacttgatgctgacgccatgcagctcatcaaatattgccgcgaggaaaggagacaacacatcttcgccaactttcgtcataaaggttgatgtgacatccaaggccgggggaaagacgcggttcattatggatatttcgtcgttgaatgcgacactgagacgtgtgaaaaaagcctgcgtctgctccatcttaagctggccggtcgacccgtcaatgcaggaagcgacgcttcctaggtcagacttccgagtcatcaggtgattgtgatggataaagaggtccacggcagcttgcccaccgttgagtgtccatagaatgtgtgcgtatttccgcatggccccatcaatgtcgtcggtttcatacccctgacggaactccttcagcgccgcagtctcaaacatcgagactgtacgctctaaacggtcgacccgctcgtcccatccttgtgtcatgtcagatttggagaacattagcaactgtgccagtatctgcgcttgagcctggggatctttatatttcgtgaaaaccaaattttcagatgatggttcagatcgcgcgatgtcctcatagaacggtgccagtgcagcatgtatcttgccgtattcctgacgcgcctcaccccggattgaccttacctgtttcaacacggtcagggcgggttcatccatgagatcctggaatacagtgggctgtgatgccgtattgactaattcaatcttatcgaatccatcggatagtgctttcaggtcactagaagggtcatcagtggccgcaggaaccggtccaaccagctcagcctcctcttgctgctcgacgacctccatgttggcgactgtcccaaacaccacttcggcatgctttctagcatctgcttcgtcccagcatccgattcgtttcaacttgtgtacccatcgagtgtcatcatacgccatctcgtgtataagcttgcaggaccgtgctgctcggatcaaatcaacagggccggcatggtcgagaatagaggatacgatctctatttttccttctgtcagcaagtgtttctttcgcctccgtatgtcttcatctcacgtacctgccggaagagcagctctggagatgtcttccattgatgccatgcgcagcgaggccagcacatctctgcgcgcctgagctgcggccgtgggccctttctttgcacctggcatattgtgttcctggactctgcatcggaagagaaggcactcgtggggatctcagaatttgaggcagcctcagactcgctccaagctgtcccgcggggttgtggggaatggttcggtctcgatatcgagcagacacggcgtcttcggggtatatttgatgtcgagttctcaagcagacatcttcacatctaaccacttatttctcaactacaaatcaggaaccacattccaatgctgcacgatcacgcacagacagggtccaacgccgccgcctcctcgggctggcaaaatgtacaccgctctctcatagagtcagctgtacggagtggacgatcgggctttctttaattggaaggaaataagacagttgaaggatatttggtttttgatgctgtagaaagctcaattgtggctgttgtgtagctatgaggaaagtgaattaagaaaattgaaagatttttaaagcaacttggtggctaaatatatacatcgggagaaggattgagatttaacatagaataatactttctgattctagttttttttgaaccattgagagccagaaaagccatttaaatcaatgatgttctccctaatatgatataagctgcaatacaagctgatatagccaaacatagctatagtaagacttacctatggagctatgtatggaggtacaggatagaacccgagatacccggtctttgaagaagatattgaatgttggggaaatatggattagtgtaacatatagatacatatgtaaatagtaagtagcaacctgatttaaaagtcttctagctatgttccaacagagcactggtgttccggtgatgcgtgtttttctcggtgaatcccgggatacgcacaaccggagaaaaaaagacgacgacacagaacaaaaagaagaacaagaagctatagaaaggatagattgggtctattctaaacaattagtagactttatatagatcaagtccattataggtcagcagaattgcgatgttccgagtgtcggttttctagcgtggccgggagccaatcagagcaagggggtaatcatcaattgtcaagtttcttcgacttcaacctcaacctccagcatctctcttctgtaccatcccccctcctctccccacccacccctctctcgctttggcgttacagcacctattcccaatcaaattcaattgcttgggttaaacatcgtcatgctgggacgttcgattctgcgcgcgtccaaccgggccttcgcccgccagtccctcgggaagtccacggtacgccctcaccccattgaccttcacggaaaaggacaattgatctcttaaaccggcattggattatccaaggactccgttgctaatatccaacagcgtgcctcttccaccgccgccggcgccgaggccgccagctcccccttctacctcacactcactgctgcgcttgcaactgccgccgccgccggttccaccgcatggtactaccacctctatggccaggaggccttcgccatgacacctgctgaggaggggtgagtgaaaatgcccaggaggatcgccgacctcatggctcattgtgcgatccatgctgagaacaatggtggaagctaacgggtgactttatctagactccacgctactaagtacccttgggtgcacgagcggttcaacaaaactttcgatcacgccgcgtgagtgctctctccttaaagccacattcgtgctctcgccagcatacattgtactgaccccgtccaagtctccgccgtggtttccaggtttaccgtgaggtttgcgcttcctgccactccctcagccgtgtcccctggcgttcaatggtcggaaccatgcacaccgtcgatgagatgaaggccttcgccgaggagcacgagtacgacaccgagcccaacaacgagggtaacatcgagaagcgccccggaaagctttccgattacattcccgctccctaccccaacgaggaggccgctcgtgccgccaacggcggtgctcttcctcccgatctcagcttgatcaccaagggccgtcacggtggttgcaactacgtcttcaacctgctcactggctaccccgacgagcctcccgctggtgctaccgtcgctgagggcatgaacttcaacccttacttccccggtaccggtacgtaacgacaagcccataccattttttttttttcctttttagtgtttctaactcggcgataggtattgctatgggccgtgtcctgtttgacggtgttgtcgagtacgaggacggtacccccgccaccacctcccagatggccaaggatgtcgtcgagttcctgaactggtctgccgagcccgagatggacgaacgcaagaagatgggtgtcaagtccgttgtcctcctgaccggtctgttcgccatctccgtctgggtcaagcgctacaagtgggcccctctcaagacccgaaagatcgtgtacagccccccgatcggcccccgccgttaaatgttgcagcaaggccttttttgagtgggaaaatgtgagaggctgaaggggccggtacgacttggggaacccataccacatccccggttttgatacaggtgcttcaaagaagcctctctgtttcatcattttctatgtgtctatctattggtcgctgtgtctgtgttttgttagaacgctccccgaacacctgtatctgtatcctagatatattctttttttcatttcctttcgaaaactgtgtgcttcgaggagtcatctgaatttaatttcctttgtgattatgacagatgaaatcgttacatataaccatgtaagtctagagttgctgtttcataggaatatgaaatggtatgttctgcgacgtggtaataagacgagtgtacagatcgttttctaattgttgtatgtatatgcaagaatatatatggctataaagctcatcagaaaaggcccagaagcaacttcaggccgaggtatcatctagagtccgctcgccatccccaaagacaggagcgaagaaacgatcatagctattccacacacctgaaaacgtgatattagccacagccaccagccatggcggaatacgaccatcaggacctgcacatattctggataaaaccaaagtcacaatcaacaaaggcgcccacatggccaggaagatcaccttcccgatcttttggcgcacggttgtaatacgataagtcttgatctgcgcaagatatttttgatatgaaacaggaagatcatgttccgcagcgccagtcttgatcaacccaaggtaacgggcagagggctgagcgtagtcagaatccggccggaaatgcaagcagaccgtataccaccacgatagctttgggctgggcagcaccgtcgtatcgcctttccgggattgcgattcaaggcgcgcattctccgcagctggtgagagtagggtgcgtgccttgaaagctggtgtggtggggtagtctgggaccgggtcggatgagttgtagggttgagggaaggcatggcagttgatgacacagtcgcggtatccacgaccaccgccctctgtggcgatgatcttcgcgtagtcggccaatgtaacttcgtagacgactccgactagaggtttgtgccattgacgcttgtcgcaacccgagactgcctccacctgctgtgtccgacccatgagcgctgccttctctgacagatactcgctatccgcacctgtttcgtgatcttggagttcgacctcgtcatctgccaaaggagaaatttccctgtaatttgtgcctgcgaaacacggctctgcatacgggattcctggaagatcgaaggtgagacggagttcgggaacgagcacacagatctgcgagagtggtttgatgccgcgcacttcacgaaaagtcttggaagctaggtttgacccgtacgcgagatagagaaccgtctcatccctggcagcggattcagatacaccaatcccgtgttcctgttgtatggatatcttctcgggaagagtcgcatcttgttcaagggaagtggcgacgcttgaggctcgacggcgttgaacattcgttctggaaatagggtcggtctcgagcttggcattcgtaggcttagaatagtcggcgaggagaaggcctcgaagccggtctagcggttgggtcgcatcgaacaggcatcgagaagctggcatctcttcgccgtcttgtgccgcttgttgtgccatcgtgtagacctataacgcaatattgggcgtatgaacatgagatctggcagcagggttaacctgcattgcttataaagcctgtcagccgcatgaattgatgcattgtcagcaaaccagatcgaatggtggcgattattaatcgtggatgggtcacggatcgcggagtttccacgggccgatcggatgaggattgaagatgcattgattccgagtggattctgaaggttagggatggtacttgagcagttgagtaggatcaggtctgaggagaatgggagagaatattatggggaagctgcttttgatagttagatgactgtgatctcaaagacgtgacaagcacgcaacttgagatataaatagaacacttggcttccccagaatctagatttatcaatctcggcatttttagatattcagtgaaagtagaacacaataatatatagaacacagctatgaatatacttccccacataattgtaagagaattaatagatattaatgaaatgagacctggctgttgattatcggatctatattcctttcatgtatatcatagtaggacaattggagtgatgttgtacaacatatagatgaggtatcatgtgatcaatatgctggaactgggcttagttcagcaccctcaccagctgcgcagctctggagaacacgctttcttttacataccatcctcatgttctgattccaaatgtatgacgatagcgaccatgaagccagttcagggctcatctgaaccaatcaatccagacaccgggagtaaggcgactgccaaagaccgagcgaccccgggatacctcaaaggctcaggtcgtcaaaagcaaaaagcccctccatcccagtcttcggagtcgaagattgtgcgactgaagctcacaaaaccaaggccacccaaacccaaaccccaagaagtggactgggatgaagatctgcgtcctacacccaatgagatagctgagaataaagggacccatggagggacctccgttgcctatacagacccgaagcgaccgaagacagttggcagaaacacaggaagcaagcgagcaatggaatcaaagccacaaacgacctcggccaaacgcaggaaatcgaacaggaagagcactactaccaaggagggcagcaatggagggccacaattgccattgataacacttactgcaagcgccttgcctcctgcagcccctctaggtaataacgggctttctgatatgggccccttggacgggcaaagcaaagattacgccacgaagctagatggccatgtgcccgaagctttgaaccaaccttcgctaccgacagatggccacaacaagcatggaaataacagcgagcgaggtgtgatcgtcgggataagaagctgcacatcggtgacaactgagtcatcctcggatttcgaagaccatggcaaagggccatcccgtacttcaaaagtcagcatcctggagcatcgggcacagtccaatagacaaacagataaaggcaaatctgtctatgtgatgcccgaggtatcctcaagttccgacatcgacctcaaaggaccgtctcgcatcactccttcaaaggtcaccatcctggagtcaagggcacttccaaaggaacgaagcagccaggccaagacggttcatgacaagagtcatcccaaaaatgatggtagagcacagagtgttggcaacaagctgatgcttgcgctccacggagcagagccttctcattacgagccagtcaatgaccgaaatgcacctctcatcatttcctccgattcagtgcaaccccaggaatctcctagaaagcagcagtctgaccaaatgccgatcgaaacagtgtcggaatcctcagatattcgaagagtactggacaaagcaattcctgttgaaatacccccgaaccaaaccgagcctgagactgtcaatccagcattgattaccaaaacacttccgcctaaggaagagaagatagaacagctggatgacgcaagcttctggaagctcctgggcgatgacagaatgtccactccagcgagttcttcagaatttgaagccggcagaggcttgatgggaaacagcccttcaatccttgattaccacatggaaatggaacatatccccggatttgcaaccctgcagcccatgagatccgcaccgaccaccccttcacacgccactaacatttacgaaagccaggcagacagttcggggatatcagaggtaggaaaactcaatgatctcatagcagggattgagggacgcgagggtagccataccccggagtctcaaaagccacttctcaccaatgaatccctaatggaaccgaattatgcatctccccatcccccaaaatcagtcctgaggaccagcattgtcgacggtaacggtagtcctcgactcatgcctcagtcagccaagagcatggtttcgcctcagtttgatttggacggcgaaaggggccacgaagagacaatcagtgtcactgacaccagtccaagtcaatacgatcgaagctcatgcagtatctctactgagagtaaatatgaagggctcatgtggaccaagtttcagagagacatattcctggaatatgggatccaaacggaaaaactggcgaaatctcatccatggccaccgcctaaaaagcatcgcccgtcgttctcccaggaggatactgctgatggggcccactccgagaaagcatcgacgactggaccaagttcttcccagagaacgatcgacgagagagcattaggcagcgctccaaagaatcacgagtatcttgaccaatcgtcccgaacagatatatcagggtcaacacagtcagctgataaatcgaatcaatcctctgcaaggggtgatcatgatgatatggaatggatatcaactttgcaagtggcgcagaaagacgcgcaccacctgcttcaacaaaccaatttggttagtcgatactgtttatgtgagtgggaccgtgctaactggcgtttagaatttgtccactcagctggcggcagaaaaggccactatcagtcgagtcctggagatctaccgagagggatgtagtcggatccttgacgacctgttccaggcgcaagaagcacgaatgcagctataccgacagcagatgcaatatgttaaggaacagcatgcagatatatgtcaagacctggttcgtggactgcaggagctcgaccgtcgggtgcaacaagggccaatctgaagactgaagacacggggcttaggaaatcacctacatgtattatttcggaggatgacacaaggatgagcagtattgcatgcaagtggcctgattcttataccgaaatatcaatatgatatgttttagtccacattttcccacatttctttttataaatgggatcgccgtgattggaactccagcgccggcccaagttcaccgaggatcacgtggaacttcttatactctgagcttttgactcattcgcgagcggctccaaggtttctctctatttttatattttggtattcttctgttcactgcaattacttccgtttccctcaattgcccttgaaaaactgccctcttcacctcccctctgcctccgatgtcggtgagtcaagcccctcattgatttttaattttacacctctgacgtcgccaattccacagttcttcattgataaccctaatgtgggcaaccacagtcatttggaagactctcgcagtaagtccgacagtttcattttacgcgtaattggtctctaacaagctctagttctcggctacaaccctctcaccccacccaatctccttcagcatgagatcgcattgaccgagaagtcacgacagaccgtactcgagggacgaaatgaagccgtcgagattgtccatggcacagataccaagctccagcgtctgatggtggtcatcggaccatgctccatccacgacccggaaatggccctggaatactgcgatcgcctaatgaagatgaaggagaagtacgccgatgagctgctgatcgtgatgcgctcgtacctcgagaagccccgcacaaccgtcggttggaaaggcctgatcaacgacccggatatcgacaacagtttcaagatcaacaagggtctccgcgtatcgcgccagttgttcgtcgacctgaccaacaagggcatgcccatcgccagcgagatgctcgacacaatctccccccagttcttggccgattgtctgtcggtcggtgccgtcggtgcgcgcaccaccgagtctcaggtccaccgcgagctgtcctccggtctgtccttccccgtcggattcaagaacggtaccgacggctcgctcgatgtcgcagttgatgccattggctccgttaagcacccccaccacttcctgtccgtcacaaagcccggtgttgtcgctatcgtgggaaccgtcggtaaccccgattgcttcgttatccttcgcggaggcaagaagggcaccaactacgatgctgccagcatcgcggatgccaaggctaagcttattgccaagggcatgcgtcctcgtcttatgattgactgcagccacggtaactccgagaagaaccacaagaaccaacccaaggtcgctgctgtggttgctgagcagcttgctgccggtgaggatgctattatgggtgttatgattgagagtaacatcaacgagggtgagtttttcgaacgtttttactatctgtcgaaagctgtttatactgacctgcgctaggcaaccagaaggtctccgcggagggcaaggccggtctcaaatacggtgtcagtatcacagatgcctgcatcaactgggaggacaccgagtcagtactggcgactttggctcaaggtgttcgcgctcgtcgggaaaaatcggaaacgaaataagctgtgttaagatattcaggttcatttacgacggggcatttcttaagcgtgtcacagtggataaaaagttcaatgattttacttctttcgggtttgaagctcaacacgttccaccctagggcaattttgctacgactttcttttttttagcagtagcgaagatcccacttagggcagcggcatttatagtggagataccgggccgatcggtctacggctacctcgaagccgacttggtatgccgccaagatattaagacccgtttaaatgctattgacttccgggacatctgaaggaattgtcaacggaaatggagaaacaccaaggcaagtacagaaaaggtttttagaagaacacactcgccgattggcggcgcagaaaggcgcctgcggaaggggtcgaggaagagcagttcggtagataggatcgtgtttagtgcaataggctaaaagcctaggtgtgcgttctcatcattgtatgcattaaatccgaaagtaaccctggcccctatgcccctgcgtagacttggcctaaattgcttgtaccttggctggaagttctttttttaagttggtcatattcactatggagacattgagacatttcaaaaatctgctattcatacaatgagtctacacattggccccgttcgattgggcagtaatcctcaaatgtcgaggcatacttgtggggagctcatcgaccccaacgaacggccaagggagccggtagacgacgttgtctaccaggatcacacccctcaacatgaaaccatgtgtgcagtcagaataccgagaaaatagattgtaccttttcctgcggcagaatagatgcattgcttcctgcttaaccaagtagatgtagttgctccgggaaaggaagcccacagcattgagttcatcgtcaaactgaagcattccctggtaggagaaggtgttcaggtaaggatgagaaccatcctgtttgtgtctcattagtaactcaaatgccttgagtgtttgcattccgaattccgtcaggcctaaggctggccagagatcatggcttatatgaatggcttcgagagttgatggcagtacatcgcgaagttcccaggaaggggtaccacagccaatgagaaatttgagcggtagagatgccgtttttaatttgggaaacttcatcaacatgccacaaaaagccttaccagcttgattcctcacacgcagagtgaaggcttgtagacaacatgggagaagctctaagctgatagagagatgttcgatcgtttgacttgaagtttccaaggaacgaaggaggcattcgggtgctttgagaaattcggctgttgcgcggcatttgtagaccatacccacatgtaaggactccagatatggcacttgagacagcagcgaagcgatttcctcaggcaaaagagatgttttggaaataacaagactgcgcaattttgacaaattcaagggtattttcggtgtcttctcagggaggacagaaataccctccacactaaggagccatatctcgagaaccttcaaggaaggaaggtagaaccaagggatgaactgacagcttcttggcagtttgatattgtcgcgtaattcagtgggaggaaagttgcttccatagtcgaccatttccaattttgagaattgacttaacatgccaaggggtgcgtcgccgaagagagagtgatgcaacatttccccgggaaagccctcttcaagcacgaatgaaaagtctagtcgaaggctgcgaaggttgtgaagttgcaagatcagcactgtggcgtacgcgtaggcgtctccatcaaaaagccgtccgagccatctgatatcgcgatttgccgggaagttcgcgtctcgaacaagcttccgggcccaaatcaaagtgtgcctatattctagcatcatcttgttccattcggcccttccttcggggacagtgacctctgttctccgggactccacgtcccaccataccagactgacatgccagatgtaggaagccagctctggccgctcggagatagtccggaggaggagcaggattttatcaatggggggatgctgccagtcccagtgaattgaccgatacaggaaaggctcagtggaggcacgagtgtcgtgtgaaacctttgacaagttgttcgaatcttggtttggcagatactctaatatcttcagccagcagtctcgagggagactggcgaggggagttgtgcccatagttcaatagatgtcaacttactatgctcccaagatggacgctgaaaggtgagatgagagtgagtgtaagaatataagaattcctaaagcaggggaaatgagagatgaaagaagaggaagaggggagggggagggaggaaagggaagaaacgagaaagagacaaaacagacaaaataggaaaacagaggaagaccaaggcgactacaaacacgaccttcagtacctggacatccgagagtagtatattcacaaatcatattaatacaagggaatcttaaaatctataatgcaagctgcaaaagatgagcgtcgaacagatggatcctgatgtataccgtgaacgccagcagcacatggcttgacattgactccatcagccgaatagcgaccagcaccatgacgacccgcaaaccctgtcttcacctcctcaaacttgcgttttctcgaacgtatcccagttgagctagcccgctgaacgataccaaggtcctccaattccccatcagaaccaacaccaagagaccgggtgggagcatcgccagtatcaacatccaaaaccgtagctttgccatcctccccaaaagcccaaaccctgacaccaccctcagaagactgcaaagcaagctccacagtccccttaacagacccaatctccttgccatagatcttgaacggccacatcatagcggtaggccgatatgggacagacaacaggaaatcccaatccccattctggttttgcaccagactctcgcgccgcttgcgggatcgctccgagtcaatgtaccagtcgagtgcgagatcgctggaacccatcaccccgtcgccctgacgttcacgctctttgcggatgacgttgaatacgtccaggggaatcgagtacagcacgaggcggtcgccatagactgcgacaatacggagaccccagcggaggtcggagccagcggtgaaggttgatgggactgggaggtctgttggaggcggatttgtatttgagggggatggggatgggggtggtgtcttgatttgtcggttttgagtgtttgagaaaggtggcgggacgcagacgaatgcgcgggttaggcttgttggcccgcctattggagcgtcggtgccgatacatagcaggcttgtgcgtggctcgatgaacatgatatgcaaaccgtcgttaatggggacggcacgatagtggtgacagtgtgttgcccggacgaagctgcgggatggggtgtggggaatgatgcggcggttgaaggactgaatatctgcgaggaaatggaattggttgctttttgggtcgagttttggtgatgccaaggcagatgaaggggaaggtgaaggtgaagggggacatttgcattcgtgcaagcctggtccggatagtgaagaaatgagacgtagctcgttgggtgtttccggactacttgggaggaaatgaaggatttcggagggttgggggagggtgaagtgtctgcgttgctcctggtgctttgtttcgttcaggctatgaatctcgatgccagcggcgcagccgaaagcgacgatcggccgccctggacagagagcaactgtccggggtgggttgtcgactgtgcagatgttgtagaagaagtggcgggatgaggtggccattttgctgttgaaatgagatcctttggtagtcgagtctttggcccaagccatatccaagttgcagatcatgccaacacgactgcagagcaatgcagcgatggtgaattgtggcttactggtgtcgatgacggccgacagaatctcgaacggacacgagatgcgtgagactagcgctatgccatggctgaagggtgcagatgctggcctagaccgttgacccgaaagataataaatatagatcgtgtagcctgtcgttacaagcaggtagttgctgcaactgctaatgctgaaagttgacccggatcgtttgccttcggtctgcaaaaccggctgaagtcgagtgcgggatgttcttcttgcagaatccgacagattcgaaaagtctaccacagcggtagtcaaaaaccccggcttctcggcattcaattttcgccccgaaaggagacattctgtcgcaaagcggcggctcattctccagacctcgctttcatctaaccgagagacgcgtggcgtttgacagtcttgcagccatgcatcccaccaccctgctcttttcaacatgttctcaagtagcttgtggtttaggctaattcgcatccactgtgagcatgtccgccgggcgttgtcgaagtcccgcggtgtcagcatggagaaaatctccagtaggatctctgccggtgcaatatttgcagcgggacgagatgagctgctcgttgaattgcgttttgagagatattgaccctgtgccatgtattttgtcacagacttattcaaaattgggggtattggcctcgttgagtttcgttttgtgtgcgtggtagaggcattcttggacatcagacgggtatagtcttgaccggaagaccgcagcgcaggcatgttgatataaccttccagcaaaggaagtgatccactattcattggatctcaatccctttgttcgatccagaacatttcttgcaaatcagatgttgggattggatgtgaagtgaatttgacggcaattaattgattggcgtgccttcagttgaaaatacaccaaatagcacgacccaagaccgtaatttagtgacgcaaagacccagggaaaagatctttcactcaaccgggtctatacagcactaaacgtccaccggatgaatcgcctagaacaccagtaagcccaccgatctgcaatctctcaaacccgaactgccagcaattttaattcaagaagggtgtccacttacttttattaaagtatatacacagctcgtgacactaaggtttgaatgaagtacgtgccaagtgcaaggttgtattggcctcacgtctgaaagcgggtgcgacgggaatttgatacgacaaaatgagacccgggagactcgagggcgaggcaagggctgacttgtttaattaaatactgcacctcatcatttccagaggcaataagctaagtttgccatctagttaaaatgaattacaatcttacgagtctgacgtcgacactcacaaaatagagtgagtcttagatgtacctcgcggaaatccgacaaaaagtggagcacgtcaagcgacatgtaagaaacgaatatgcctatttaggtaggtgattaatactagtacatcatgcagtcatgtagtagatgcagtaaatgcagctactgtcattccatgctggaatggacgttggaggcaacgggagtttagggtttggtgatccataggcctaaccatcaagctcaacttacgcatcgagattttattcgacttcccatggttcaattcaatcaaccgtagcagccatagagccgtgttgcagtctaagaagatgccctgttccaaaggaagtgcccactatcaatctgcaacactgacattccagatctcggggagagaatcgaggaatgcgccccggatgcagcgcatggcttggcactgtcgaacctcactgcttacatgcagatgtctctaatcgtgtgatgatggtcataacaagaagataatactaacagccttgaacaactagtatttagttcagcatatcccacattcctgaacgcccaaggatggtttgttttgtctctgttcttttcttactgtttcatctcctcaccgcaagagagacaaattgtgccatcccccactgctcaggaatgtgcctcgaccatgtggaccccagggattccagaagacggcgattctgtggatgttcgaagtatgcctgggatgtgggttagatcgaaccggtttgcgaagccaataatctccagatgcaaataatggctattggacggtatattgttttcatatcgatgtttacaaattcacaattggggtgtggcccctagcagaataatgtctcaggttgtctcattgaggccaatccttgagacgcacctttcctgcaccttttatcttgacaactgtaccaagctatatacatccaaatacttctacattcgctagagaaaaaatataagggtttggctttctcatccctttcttcgggacctattgactttgtgctcagacacttccacgtttttcgcggacttattttggaactgaggaatgcgagaaaaaaagtaaacctaagcgagcctgatgtctttgccgaggaatccgagatacagacgtacttcggttggagcctgccttggacgtccgaaaggcagccggtcacgcctgaggggtaattagaaagcgacgaaatccacggaccagtatcgtacagacagatttgcgctttgagaaggagaaggccagaaatagcattgacgcaagataattatggtatcgtatacaccgagtaaatgtatctacagctccgttcccataccgctctcaatcatgttccctctcggtgcgccgggtgctccaaatgcgattagtcttagggactcggttgattcttacagatgatagcgattgcgcctcactagcgacctagatataagcccagaagtaaaaggacttgtcaagtccaatgaattctagacgacttctctttccagacacaataagccaattctatgccggctctatattcgtgtttgacataaacattgaaccacataaacgaggggactggaaaactaaataacaaactcaatcactgcgcgggaggggaataacgagggacaggcccacaacaggaaaacaatcatttcatacaaggatatcataaccatgaaaatacatcagaacaagatcgtgaaatgcgaacaaggtatcaagatcgtaaaacatgacgggtcaaagacacatgcagaaatggaatggagtatactgacaaacggcacaaggggtagatcaggcgaacctacacaaccagcgagatcaaacgctctgtgtcggatggacgtccagcgcggacgcgccgtttccgttgcctcgagcggggttgggaccagggagccaggcagcatccaacgggataatcaagctcgggttgacgtacttcctcagccgcaaatcgaggtcatgtccgccaatgcgtatcggaaagctatcgcgatctaggcctgatggcggtgagaaggtcgatgaaggcgagggggagatgtcgccaccacccggctggtcccgattgatactcttgagggcaatgaacttcatcaggggctcgtatgtacgcccaaaccagtatgaaaaccaaacggtgaagcctagaagtggcaccaggagtagcgaccgcgtgatagctcggcgcagagccagaacaccaatcatggccagctgatgaaccaacagccccacaaacacgcgattgcaaatcatcggccacgcgcggccagtggaatgttgctggtgatccatggcatatagcagttggtatttgtagataaatttgccgactgtgaagtagatcagcccgaataggcagatcagccacgagctcgggaacacactgtaaaccacacagatgactaatatcaagatggtttgcgggatggagaaaccgtagctgaacttgggaggagttgacagctccgcatattcccgtggcgtgcgtgctgataggaattggaaggggtagagtgcgacacttccgaattcgaggagtcggaaggggaaaaggcccaatccctgcagaatcaacaggttgatgtagaatggagccaggccttcgagggaattggccaatgcgagggcaattgttgtagaatctttaaatgcatcccgaagactttcccagaacccatagaagccactcgctgttccaaacacagtgaacagaaggaacaaattgaagaacgagaagaagaaattcttggagatcacggagagctgaacatccccacgtgacaccattccttggttgttcgagagccctgcaaagataattagcgatttgaactacagaacgggtatgttcaaagacttacactcatacagataaggcacagctactgtcaacagcgagaatgcgagggtaggcaatccggtctgaaccaacgacttgacgatcggatgttcctggaggaattctgccagccgagggacaatcgtctcaagtgtcttcagctccagcaatgaggcaataggaaccaagagcacagaccaaaacacggtgaggaatccaatgaccatggtgatggaccatgactgaaccattcgtcgagtacgcgacaagtaagtgtttttccaaataacatctgccggcgccggtgcaagtcgagcgaacatttgcattgggtgtggatcaaggatcgcttgaacaagcatttgagacgcggcgattgactccatcgtgacgaaagcaatctcggtagtaggatattctttctctcgggcgtttttgatatgttcatcaatcttccgtagcttctcctcatagtaatcgattgcatcgatcatccggaaacgaagcttcaatggaccataccagatacgagtcttgggtctttcattcgaatactccgcgacatgctcgttctcgtgtccggacaggagtccggaccgttcatcgtctgcatcacggggttgttgctccgtcagcggcaatgtatttccatcgttctttggtcgcttgtatcccatatgttttgtccatgctctctcaagttcacgaatgactttcattctctcgtcgatcaattcgtccagctcccgccactttcggcacaccgtgatactctccactttgccgactcgcaggccttccacgaattctttgatcttatcttcggttcccaagtcattcgggattccggacagacgaatggtgcgatcagtggtgcttgtctgattcccgagataggattgccgagtgcgaataattacttttgtctcgtcaagaagcatgtagatggccaagccactgaagacatatgcgaacagtacgtatatccaaagatatccagggtctgtaactggcttttctttttcgattccaccaagtgaactcatggtatcattgccagggacgttatcccagccaggaactccatattggccggtgtatttgtagtgcatagggaggatgatggcaacagcgaagataaagacagccagaagaaatcggatcgcaaacttgaagaaagacatgaactgcccaaagactcaagtcagcaagtgtccatgcattgtctggagaagccatagcattcgaacataccacatatgcatctaggcccgcagactgcagcacctcctcttctgtaatccgatgaagaacgggaatccaaccaaaaagggtatctggaagctcaggtaactgcgaagcagcatttctttgtcgtcgtcgggcagcatacaactcggtccattttggtcgcaaaatctataagcaaggcagtcagcgattgacgacacctcacagtaacagagatacttacacagaacgtcaaaaaggcgatgagaccaagcgcagagctaattacaaactgcgtgtatagatcgcgctgttctttcacagggtcgttgggacgccatggccttttgcttccgtcatcaggcttgtcggcaagcaatgtcaacgcagcacaggctgctgatgccgtaagagacatgaatatgttttataagggatctccgcacttcgggtttccgtgatggcttcgacgagcgagtgctgtcggagctaatggttcgtcaagggcatgcgggcccactgaaatgactgacgtcagggggatgagatggtcaaatgttggagacgattcgatttctgttgttgccgcgattgtcgagtccttcgatttgggtttcaaagggagattgtgaataaatggggagtctccccctttgttttttgctgttcatcaaaccttaaccttcaatgacggcttccggagccggctgcataactatggatgagtcatcatttatacgcacccctgggcataatccggggattgcatgatcataccaacgccagatatctacattgactcaggtttgaagtgcgctctatagatgatctattttgtgtcacagcctgacgtggtgcaaccatgaatccagtcaaaagctgggaaaatctttcatgcatgatatctaattatgcgatatgttcaggggaatatccaatcgtttatctaaaagccccaatccaaatttaggaatgcatcgatgcgtcatagtaaaggtcaagcagacatccggcggaccaggactgggtgggtgactgtgtttttcgttagtatcctgtacaaatgagaaatttatcgaaacgaaagtaacttaccgaatcattacaatactccccagtcttgttcgtcaattctgttagccctttccaaggactctcttgcaatgccttcttgcagccatagagtcgtcgggtgacttgctggaagcattcagtccgttctccgggcgtctttcggcgcaggagatcgaaatgcaataaagcacggaggaagtaaccgcgttgccagacccactctggaccctgatggtaattgcgacccttggcagtcgcgaagtcactggagtcatcggagttgatgtagtatggacggtagttgagatcggagggatccagtgtcgccatacccacagggcccacgattgtggagtcggcaattgacagagcgatcagagcctttgcaggcgtgaatagatcccgagcgactgacattgcgatggggaagttggagcggagctggtagtcttcgtagggcttgccagacttgtacaaatccttgtagattcctcggcggttgacgattttcgcgtccacatcgtactgactatcttcactgggatcaaggggaacatagtagcaccgctcgaagttgtccttgattttgcgcgcccattcagcaaaagtaatcttcttgccatcggagatatccacgccttcatggggatacgccttggattcatgcagacgtgccacccacgccagagcgctgtaggcgagaccggtaatctcgatagcggcaccatcgcggggcgttccagggacacctttgtttccagccttggtactttctcccatcttgtcttgccaagtaccacaattatcctgattgccaccgaaaatcagacccgtttcccagtcaaccttaacgtcgatctggaaaccttcaggcttcatctgacaatcaaggtcgggaccagcgttgtattctctgaaagaaatgccagaagcatgtctttggaaaacttcctggacgcattcgagaagagtcggagactgagagtatgcccgagaatcatcgaaggggaaccaagtgtcgtcataaggcaagaatcgtcttggaaccttctcttgcaagatatcaatgccgttgggtgccatttcagtgaagtcctggatggcttggaggaagaaccagacagagtcccgagaattgtatcgtggcaattttccgctgctcagcaaattgggaatcatgccatgcttgattacacttgcaaaagcgagaatatgctccttagcgtcatcaaagcgttgagtgcaaaggaacaagccacggatagaaatgaaaatatctcttccccagcatcttgtccagtcaactgcaaaatgaggcagtccggctgcaagactggggaccatcttggttggccacaaggatgcggatttcacatagccagtttgctgtacgctgaccatagccaattgatgaatgaattcctggccatgccgcacgttctctcccaggagatgaatacccctcttccacgcagcattgtaagcaacctgcagaacgattgcgaaataccttgggaaaaggaagttgggcaagtcgcggacagcgttgaacttctcacgaagccatgcagcaggagttttcaaggcgacacatccttccctagtagccgccctctccaggcgaccagtgatgtagtccaaagcccactgaccctctcgcaagtgatcgcagagcgggtggccaatttggttatacttgatgatatcctcaagaatactccaccaaccctgaagaccagcatagaccataggttcaagctttggaatgctgtaaataccgtcctgaccgtcgctagaatctctctcttcagcttcgcaccggtatagcacaaagttcagatcaatcaagctgagctcagagaatgcgtcgtctgcaccatcggcgaggttgttttcaaatccattggcatggtctgctccgggaatccatgtctcgaaaagagcaatagatccgggaacaagggaacccagtacggagattttgagatctttgtcgtcttgctcgatcactgcaccttctatatcccgggtatggctgggaagacctttcaaatacttgtcatcgcctaggatcttcgcctttgtttcatcactggcatcaacctcaagctgccacgatccgatatgcttggcactggtacaggcaatatgagttggggcgagaatcgcaccactctcattgccagggaatgcggtatgcgcgaccaagaagataccctttctggttttagggtggactcggtgcacagtgatgtattcaccatcgtgatgaatgtgagtttcgtcgtagccttcaactcccatcatagtgtggagttcattcagaacctttttgacaccaccaatcccaccctctccagacccgacggctagagtctcggaattggaagagtgagaggtgtattgtcgagtctcatggacaagatcaatgagtttgggatacacctcatcgtagcccattacacttccagtcgcggaggcacacattgccacaagtgcagcatttggaagagtgtctcgagcatcgcgcttctgggcagggagttcattgtcatgggtacagtccatgaacaaggccggaactggacagggccgaatatgagtgatcttttcgccactcttgcgagacctagctgacgcaatagcatgactactgccggcagaaggcaaatccatctcgaagcttccgatcggctgacccccatgacgatgaacaagacgactcaactcttctgtgctccaagcctgcatggcctcccgaatcagagcattgatgcccagccgtttgacgaagacatagtcggcctcctctgagcctgtgaatagttccgcaaacacagtcaagtcaggccggaccttgcgagcttcgtccagcaaatgttctgcaaccactagcggtgtcgaatggcaattatcgattcggaaaccactgaagtacttagccatgagacgggtatactgcgacatatagtcccagaggaaaggattatcttcaggagaggatccgtatcgaagttttacacaatcaccccacacaataacttcgcggcgtaagtaggccctggaatcgggcccggcattatctttcatcgcgtcggcattccagatccaaccgttattgactaaagccagggctttagggtcgtgatttttcgtgatatcattgagaggaaggcgggtaaagtaagtctcgatcaatgggttttccttggtgacaggacccatcttgggaccatgatcctcaattctgagatacttgatacgattgaacagttggtccatgatagcatcgacgtctgcatcatactccttgtagaatggcaagttggcctcatcgagtatgtgggacagggcgtgttcaacctcagcaaggtcggtgtggcccttatcgtaatctccaaatagcacatttagagcaactgctccgaactttgggtcgacggcgcggccaaaacgtccgcgaatctgctgaacggtcggaattccaagctcgcggagaacattggcttgttgcgtgagcgaccagtgtttgaattgctgcatctcgccgctttggacaagcgcaggatcgatgtctgcattgatccattcgtctataatcttcttaacgtcattctttacgtcgagaacgtagaattcccatagacgagttccatcaatggcttccttgcgtgcagcgttcataacagtcactagatcctgctccgttttgaattctgtcggaagaccggcgtccttgaggctatcgccgaatttcaaaagcgccgtgtctagctcgagggctgactccagccatggcgcggtctccacactgtaaccagactcgggatgctcctccagccacttgctgttattagctgtgtggttccataccacatcagtcaatgtgagaaggccatagtctttctccatcttcgcaaccaatgtagcgatatcatcttctccattagggaaaaatgcgggatcgaatgttaattgatcaaaaatactatagggcgagttggacgagccacggtgcatcaggggtgtgaaatgaaccatgttgtagttccgctgaccgatcccacgaaggtgtctatcccagtctgttggatattgacccatgaactttgagattaccgagaagatagagagtgcattaagcggcaaatctttcccctgaacggtaagtttgggcgacacatcaatgtagtgaacaggtgtcttcgtcggcttcggggtagacaccttgtcgaccgagaactctggcagcggagaaaatgttgtatagaaagcaaacgcgcccgcgaatgtcacaggaatatcgatttgaatgttctcactgaagttgggctgcagtctacttttattcagcaactggcactctcaatttacacaacatataggaagaattgggatgatctacctgaactcccggaatgagtgacgttcaaagggctttccctcctcgggaatattcacccagagactgccttgtcggcaaatggagctcgttccctcgatgatgaatcgaagcacatatccggattctggcggagaggccaggtaaatgtacccaccaggcacgtctggagaaccgtcatccttcaaaggaagcaagtagacctgacgtggggaggccatcgcgacgggttgataacgattaaacccaacggattgtgagagtacaggagaatctcaaacgattcgccttactgtcactgcaatagtgaagaggatagagaatatttaaggagagaaggaaagaatttaaaagcagggaaggaaaagtcggaagacaagagaacccagcgttcccctcatatgttcctggagaaagctcagaccgcgcggggaatgacatcatgcactcattttccttggtaagctatcaacaccatctacgtcgctatgcatccacttgttttgacagtcttttaaagattcaaatcgtctagtaaataatcccgcttcagttcataaatacacgccatgaaagtctatacacgccatgtccaatgccgaatccagccgtaattataatcgtgcagaattgaatcgagcgccattatccttaccattggaattttgtgacggagaaactggggctcgggcgtgaggggggctagagagagccaaatggtttgataagtaacatgaacatagaagtagaggacattcaagggctttttaccgctcaatgtaagaaggaatctcctcgaccttcatggtcccctccaaaacacctgtgcaatgttagcttggatcgagccgtcacatgtcaaaagaacagtatgaaaaaaaaaagaaaaactcacggtaaacagcagtgaacagagggaactcatcctccatgccttgtgtccgcaggaaactgttgacttctatagcagtagaagtaccttgcaacttctggccgttgagctcagtcctctcgatctcctcgataggctgattgcgctcaacgctgtacttggcacaccggaagttacgaccgctgctggcgctggtgatcaagtctgccacaccggcgctctcatcggtgaaggtgcggttgtcaatcgtggcgctaaagaatgtgtctccaaacttgaccatttccatcaagcccacgcgcatgatagccgccttcgcgttatcaccccatcccatgccgacaacccagccagcggccagagcaacaatgttcttaagagctccactgatagacacacccgcgacatcgttgacaacacgcacgtggaagtaagggcggtggaagagtgttttcagcacgaggtggtccacaggagggtatgctgacggcagggcctgcaacttgacctccgagatttgacccgtggtatccttgtgctggaactccaccaagttggttgtggaggaagaaggcgaccgctcgggagtgggggcctgggagtccaagtgtggggggtcataggcgatgctggtctcggaccacttctcttgggcgacctcaccggcgatgtttgcaccagacagggcaccgcaataaatgcccaggattctgccaatggtctccgagaagaggtggatacctgtactgttgacgtccacacccttgatgcaagagatgccacgagcgtaggggagaatcttgcccttgatttgctcgcaggtcttgataataaactgatggggcaggttgaagatgagaatcgtgctgtccttcaccgcatcctctagggacggattggcgtggaggttgactggcaactggattcctgggaggtacttgacattctcatggaccttgttgatcacctcagtcaatttctgagggccggcgagtgaggcattatagttcttagacgtcttcgggacctcgacattttcctcgaatacccacatctccaccttctcctcgaagagattggggtttccggccgcgttttcggcaacgatcttagcgatggcgcagcccctgtcgaggaagcacacaattagcacaaatccacagctctttttgaagactaatctcttaccagttaccggagcccaccaccgtgatcttgtgcttgcgctgatgaggagctgtagaacccatgatgtgtgtaggagaaataattgatctgtgggaaagtggtctggagaagggtttaaaaggcaaagaagaggccggcgggggcaaacggggtggaataatgaatcgggtctggaaccgggctgaccgaggtcgaaatagggcgatagaggtgtgaggaacgcagatccgacgtaggtttagacgaatatccatacaagttatcgttgggaccccgataattccaacctgtttcgggattattgccttctgatcacaaacttctgatgtcacacgcaaagtcgacttcggagatggcaatttagcgcataactttttgttttcgcctttgacacacacatgaactaattagttgaggagagagccaaacagcgttgagttcctgggcaaaggagtggggagagtggatgcgggcggtgaacaattggagtcgacggggtttcgcttttcccgtcgcaatttcgtcttttcgttaactccccgctgtagatctcacatgtcaacatggtaagatgcactattacttatcttgttccactttcagccggttaattatcgttctatcttcacaggcccccattcgcaaatcaatgacgaaaactgcctcgggcagaggtgcgatagccaaacctagtgtctttggtgacgaatttcgcacgagcaagagggataagcgtcagatcaagcatgctgccctcgtgtctaagatcgagaaaaactctcaaaagacccccaagcgtcgacgagcatcaaaaaaactcgtcgccaacctcgaatctttggccgatgccttgcccgaagctgaagaatccaacgatgccgccagtcaagtgaatgtcatcaagcagaagaccctgagacacaagccaggcgccctgaagcgccgggaaaaaatggaaagattggagcgcgaccgtttcaacaagaacctgaccgagatgtccaacatcacatcagctccggctgccaacaatggcgaggcgagtaccgagtcgaacccgacggccagtcggtggtcggcgctccgtaacttcatctcacagacgatggaacagcagcctgtgttcaagacgaataaataagggtggctaggatgaaaataaaaagattcttggtgattgaaccacgactccggttgctgctgctggcagtgaatatctgtctcacaagtgaattctggcaatgacaatccaaggacaatgctaaaggttgagtttaggcaaataaactggagtgtacgacgctcaaccaaaacacgatcggaccacttgcttctataggatctgaacggtgaaatctacggtgccaagcaggttttgcggttcaagctcctatatccctgggggcattcaacgccttctggggccacagacgccatcaaacagccctcgatattagagaccaataatcaaatacccatgtatttatcttactaaattactgtctttccactcgcatgaatcagaatcaaatttccaatagctgaaatattgaacgctatggtttgaactaaccagcttatgttatcaagcacaattccatccatagttaccacccacaccgtttgttcaagggacgtcgtaattcgtcaccggtacaagagttatctcccaatcttaatatagtaaattatggatcagttgcccgggggttgctcttctagtaataggaccttcaagattacatgaagcacacaacatatcttaaggcttcgagcatcaaataaagcaatcgctctatcggcatactcggtacatcgttattgtctttgaatttacccgccggtccacccggcctcttcatcggcccgatgactcatcagataagatcacctgcggggaaggctaactatccggtatctaatccatcgctctccaattctcccgagatccttcctttaccttgtgactttaaggttctctacccacttcttataaaccgcctgtgatccactggcgcccagcaatgctgtggcggcacttacagcctcgcctcgcggcgaccttggctcgtcgtgacattgtccggtgtcggcttcctaaatcatacagccggtcaacacgccaactgtctagctccaacacctttcccacatcgtctcaatttaaccggtcagaatttacaacacaaccatttactgggagctacgagactggaggtcctactccggggccattaggatcaaccccggccttcggcgctccccgcatcacaccgaaagtcttaaagcaatatcttgatcaatatgtggtcggtcaggatcgcgcaaagaaagtgctcagtgtcgccgtgtataatcactaccagcgcgtgcaagagttagtgcgccgagaggaagaagcagccgaggctctcgcgaggcgtcagcggagggaagcactcgagattcatcccttagacggtatatcacctattgagttttgcgctttcgctcattttctgattgatttttcgatacagcagatgacattgcaggcgtgcgcaagactgctacaatacctcaagcccccaaatcccgcccagacacccccttggaccaagcagatttcgccgatacgtcgccgctacagcttgaaaaatccaatattttgttgcttggtccatctggtgtaggaaagacacttatggcaaagactctcgctcgggtgctttctgtgcctttcagtatctccgactgcactgtgttcacacaagccggttacatcggagaggacgccgaagtgtgtgttcaccgacttttggcagctgcggactacaacgttgagcaagcagagcgtgggattattgttcttgacgaagtggacaaaattgcagctgcaaaggtcagtcatggcaaagatgtcggtggcgaaggagtccagcaggcgcttctcaagatcattgaaggcacaaccgtgcaggtccaggccaagccagagaagaatccccgcgcaacgaatgccccgaatagctatccctccaacagtcctctggggaatgggtcatttcaacccaacaaccccaatccagccgccaagggagaagtgtacaatgtgcgcacggacaacattttgttcgtgttctctggcgcgttcgttggactgcacaaagccatcatggaccggatatctcgtggatccatagggtttggtcaaccagttcggaccacctcaaacactagtgatttccctggctcgccaaatatctctaccaaccagccacttccaatccttccgggatctgaggaagaagcactatacaagaagcacctccccttcttctcctctacatcaccagccggttctggcgccgagccaacctatttcaacgcactcgatctgttaacaccctcagacttgcaaagctacggcttcatcccagagctgatcggcagaattcccgttaccgccgctctctctgcactttctcaatccttacttatgcgcatcctaaccgaaccccgcaactcccttctagcccaatacacgaccctattctccctctcgggtatcgagctgcgcttcaccacaccggcactccacaaagtcgccggcaatgccttcacaatgggcaccggcgcacgcgcgctgcgaactgagatggagaccattctcagtgacgccatgttcgaagcgcccggctcgagtgtgaaatttgtcctcgtgaccgaggccgtggcagaccgtaaggaacagcccatctaccttgcccgtggacagggtgggcgtttccatgctttaatttccgccgaggaaagtcaatgggaagcaaagactcgcggagaaaagaaagaccaggcccaaaagagtaaaacgcaagatgatgcggatggctccaatgcgttgaactcccaggaccagaatcgagcaactggttaagtgtaaataaatggtatactttcatctcaccccccggtgactatgtatttatacatttccgggtattttttcttcgtatcccagttgcattggcggcatttagcgtgcagttcagcaaagcaatacctttggaagctccatacgttcgtacgatcggtctttcattactgatcgaacgtggatctcaattttgaatggaattactatatatgagtaaaagtctcctatgaaacttttcacaaaagtttgggttcatttcatggcttcatggctttctaggcatagtacaacaagaacaaagcaaccggggtatcataaaagattgtacaaaaagagaatatgagagcaaccatgctgtttgaagtagcctgctttgatcggaacttcacaagaatcacttgtagggagcagggtactgtttcgtgccattgccgttgctgcttgtgagggtcgattgaatagaggcattggagttgtgagatgtccaattcggcgtctggggtgtgctcatggccaccggggtagttgcttggctagaaggctgcagcttgggacccgacaggtaggccatgagggtcaatgaatctattttgaaccgtttaaagaaatggccgaaaccacctcgcatgacagtcatatgaccccacttgtcccaccgtgccccagtgggagcactgagtgatgtgacagcgacgaagttgcggaagcgtggtatgttaatcaatgaccaccctgcgaagaattcgatcagatgatctgcatcgcgttcaaccttgtccttgattctgaggtcgtggtgctctgtacgactacagtattcatccagagagggtgcgataacgttgcttcttgagttgtgatgtagactggctttatcaaacaaagctgcgcgaggatccgtaacgttgttcttgatgatcaacgtgtagatgagcaacaggctacattcaggttagtaagaagcttgagctaaacaacgatagaaaggtatgacatacagtccatgatcttgcgagtgattttcgtcaccgagtctcatttcgatccattcaagtatcctagggggaaacattaacgtccaagatttccgtttgtgcttatttgcattccgaatccattgcagagtgaccgccaccccttttaggtctgtcaacacatcttcagtgagaagtatgacaccgccatacggaaagatacgtagacggtggtcactaggtgaacaataccggggatcaactaattcgagtggtctctgaatgcgaaccatccagaaattgaacgagtgggcaggaagcacagaattgagaggaggctgcaaagtatcgtatccaacgaatgattcgtgaaactgctcttgattagttgtctgacaattgtgaacgtgtaaaaatatcgatcacatactatggctacaccctgtctgctgttgtgcacaaattttgcccaatctccagggctgttgcttgtgaaaagaatcttctcatgatacttcaagtgcacctgaagaagctgcagttccttttgtatttcttcattgcctaggggaaagtgcaaatagaaaatatctgcctttgatagcttcccaccttcctcgattgtcgcaagttcttccacattgattttgtgggctttcatgaaatcttcaaccgcttgaaccgctcgagcggcttgctcatcttgtgggtgagggatagcgcacattgaattatccctgagttcacttgtgggcggaaggctttgggccggcgctggggccagcgtctcccgcgagtgcacggatccactcattgttatatcacggtggaagtccgaccgtcttgggggactgccagactctaggctatcatccctaggcgccttgacgcgcagtgaaagcgatgtatttggcaaaaagccatgcggtcttccgtgaggctggttaggtccacttgaccagagaatttcgatcggtgcgagcatagtgcgagcggcaacgagtagaggaatgccaggtggcacttcatcatcaggatgtggaaacttgaattcctgtgacccgtatgaccaagcaaccaatacaattggcggtccatttccgtttcttctcctcggaggatagtggatggcaatgaggtcgtcctttcgcagattctctgctagatgaaacaaattttcgttggtgtcgctgaagccctcaacccaacctgtactcaatacagaatttgtcgcctatagccaatgttagcattatataagggacaatatacagatctggtactgacactagattcgcatagtctctcgtactccccgactgtgcataggtgtctaaaccaaacttcaatctgctttgttttcgggttcttggtcatgactagagatttctggatatccgtacggaagccgcataatctaaaagcaccgaggaatttccggtccgatcccataaacatattaacaagagcgtctcccttgacgcaccagtatttaccaatcttaatgcaagtggacggccgataagcacgaaccggcatccttggaaccaatggagcgatggaaagaccgggttgagctggtggtctagctttgggcccggtgggaaccaatggagcgatggaaagactaggttgagccgacgatctagctttgggcccggtgggaaccaatgctggagcattgactgatggattttcatctaacccagttgagtttgaagattttggagcaagccgataatgactcggagacgggctacgaggcgtgtaactatcacccatactacggagggaagaccttgacggccaaccggggggcggtgaccgtgatcgccgataaggtggtgatggtgacctgcgagaacgcggtgaccgtgacctgcgagatagtggtgaccgtgaccatcgagaacgcggtgaccgtgaccatcgagaacgcggtgaccgtgaccaccgagagcgcggtgaccgtgacctgcgagatagtggtgaccgtggccgtcgatagggcggtgaccatcgagagggcgatgaccgacgagagagctctgacggtcgataggtattagccactattgtggtgttaggctgcctgggggagttcgatctatattgttggactgtctcacggctgtcgtgcgagtctcgattctcagtaaccctctcgagattgaccattgcacggggcttagttggaatggctggcgagataacagtaagactggaacccgagagtagtccagcgtctttcactgaattaccttctgcacgccccccagatagaatgaccggagggaggaccgagccagtcgaggccggaggacaggtagatgtgttgatattggcctgtggtgagggacggggagctagtgatggcgcagtaagggcggaggttgaccgcccgacaggattcgtcaaaggagcctcacctagagacgaggaagtagaggcaatagaatctacagaaccgggataggtgaggttggtctgcggaatggactttgactgagtagattgcggaggggaatctagagaaccaataggtctctctggatctaagccagacgacgaaactgacctagtggagcctaagtttgaagagcgagacactggaggagccatggctgacgagggtgcgagaagaacatgttcttgtggctgctttgcagctttatcgtctatttggccaatatgtgtctttagtagaccggtcaaatcgactgggttctcagaagcagattgattttgggcttccagggttttgggacttgttacagatgggccaaccactgagatggtgctgcctatgttcatccttggtggaaattcagaaggcttcatcagctccatctgtgacaagtccggtggtcgttcgccccatttcttatcacggtatgcgcgcttggcacctgggcctgtggcgaaagaagataatattggctttgctgcttgtggggggcttttctggcgcgcagggagtttgtacttggcagtaattcttttcgcaagctgagatagtcgcgagtttggaagcttgcttgaggttgtttctgtctgtgcaatggaggttcttggttttggaggctcgttcctagatgttgtcccagtaggaggtgctgtttgtagcagtgattgacgagccgcattttttgatggtggtggggtttcagctggaacaaacaaggccgaagaagcggtggaatccacggagaggcgattgggagctccgtgagacgaaataggtggttcgggctcatgggcatctatgatatcgggattggccagtcgagataattcagtttgggggaggtttttctgccgtgccctttgctctcgtttgcgccttcgctcttcttttcgcttttttgttttcttctccaacaacttcatatgcttctcccacgacttgagattgaagggagtcaccttgccctccgcaatttgtttctttttctcttcccagccatctagggtctcttccgaagtaaacatttccttcggctcccaactgcatctgtccatgctgtacccagcccactcaaccaaatattgagtgataaagactccttcgtcatcctcagaatctggttctacgtagaacctccgttccgcatggatgtcattcacgagatactccgcttcctcttcactttgggcggtagacgccagagagtcgacatcaccaactccagaggcatcattcatctcagaatcagatgccatggtagtagcctagaaatcgagtcaacaaatgcttcattgtgcagcgtccaacgccccatgccaaatgtgcaagcaagacagtacttgggctgaaactttgagttgcagggcttcggggagagcgaatgcgtaccgtatttcatattcattagatctaatgaaaatagagggataagcccacagagacaatagcagaagtaaaagtaatgcgagcaagagtaacaacaagaaagttgatcagttactgcccattgataaaggataccgcccgcgcgccaaacgccaacccacgtgatctccacactaatccacaatgggtggacacgattaaggagagacactcggcccaggtatcactgactatcccctgctgattctctattacctcccgtgtgttcgctccccttgttttctttctgcctgctgcgaaatcaatactgacatatctgactttcactttctcaaggccacaagtacacatctcagtcttcacttgcccgccacgtttacctgtactttgatactacctttcgagctttactagctcgatcacattcaaaatggccaacgacgaatatgacgtgagttgatttgggaccacgagttcctccatgtctcagaaccaaatgctgatgatgatatcctctacagttcctcttcaaaggtaacctcgccacttcacgccgaggcccgccctcgtcttatcccaccatcccacccccccctttgccccatttcaaaagatccttagactgactgcggaggtattgtggagtgaatagtggtgcttattggagactctggtgttggtaaatccaacctcttgagtcgtttcacccgcaacgaattcaacctagactccaagtcaacgatcggtgtggagttcgcgacccggtccattcaagtcgactcgaagacaatcaaggcacaaatttgggataccgctggtcaggagcgctaccgtgcgattacttctgcctactaccgtggcgctgtcggcgccctcctcgtttacgatattagcaagcaccagacctacgagaatgtcaaccgctggttgaaggagctacgtgaccacgccgattcgaacatcgtcatcatgctcgttggtaacaagagcgatttgcgccacctgcgcgcggtccccacagaggaggctaagcagttcgcaagtgcgttttccggaatcactttctctgtgtggcgctgacattcagtaggcgagaacaatctttcattcatcgagacttccgcgcttgatgccagcaatgttgagctagctttccagaatatccttacaggttggttgtcgactccttggaatttattataacatgctaattcgacagaaatctaccgcatcgtttctagcaaggctctcgactccggagagggtggccagcaggtcctcgaccgccgtcccgttatcgaccccagcaagcaagacagcgagcagaagccgggctgctgctagattacccttcgcaaggacgaaacagcgactgccatgactcttcttttgcgatgtgacattgagatggtcttgatctgtatctgtgttggagtctgaaatttgactgctacaaagatgatacacaggcgggatctgttagagaaaccccacgggaagataggggtctacccaaatcgatgttaccggctgctggattccccttcttcagtcctttttttttttttgctcgttttcccagtgatcctcaacgaaattgatcccctttttctgttcgcttgatatgtttctacgatggtgaacacagcttggctgggcgtctaacattgcggctgcgtggcttttgtatggaaattctcaaattcgtatattcattccacctattttagtgtaattgtacaatgttgtagtcatgcaatcccaacaaccttcgaagagaacagtggcgatgctcgtcattacggttcacgtgctccacagggcaatttacctctcctggccagtgtccactagaagactgacaacgctcgctaggaggggttttatttacaatttacaactaagtgcctcatgtaaattgaatatttcctggagttctgcaaagaaaaatcaaagccctcgcacacgtatgtatttcgataatttcaaaaagtcgacaaacaaatctagtttaggacaatgcccatgtcacgaccagccactgcagatctaaattctccaagctcgagcccacgttcattcatgacatattccagggtgtcaccaaacgtttcaccgttgttgcggaaccattcccctagggaccagacgtactcctctacctgttccttcagcaaagcatggtcgcgcaaccataatatttgaccaggatcgagcttcagcatgtcctgcataatatagtaatgtgggatctcgtcaccccaaccttcataccccggatcatgagaaagatcattgcgaaaccgagacctaaatttggctggcgactcggcataatttcttgggtgagccgtgtggaagaattgttgaatcgaggtatcaggaccattctgaagcaaggagtgaccatgggaagacatagaagtagttgaaagcggtggataattgagatggatattgaacgagagttgctggctgctgtctggataacgcttgcggaatttgcgttggatagtcccattactaggacatatgtgattctgaacaatatcacccatgacgagacgcaaatcctcaatctcggccagctcttgggtggaccagttgtggagcaactgagcgcgctccaatatcacatggcgaagactacgagaatggcgatcataaacaccagaatggaatgcactgtgatacagccataaccggtatactgcgcggcgtaggcgtaatcgctcttcgtcagtgagcgagcgacgattctcgaagtctagtttccattttttgaacgggtagatcgtctcccattttcgtgccaccagaccgagctgaatgacttgtttcagaagggaatcagacatgggcgcatgtcggataagatgagcagcctggctctcattttgcgtcaccacttgaatgacatcgtcaaggggaccatattcggtctccgcgacactggctaggatatgcagtttgcttgttgagttgaggatgcggtgaagtcgatggcaggtgattgataaattcaagacatcggagattgagttgcacgagcgaaatatgtggagtagaagctccgtcgcaagatgatcgattcgcataatggaaatatgctatgtagtttctgtaaagaagaataccgttagagtgactcatgttaaaggatcaataagtgatcacatacctgctcaggggttgttatttgtagttaccaggtaatttgaaagaagatagtggccaatcttcgaggatttatgtatgaatcaaatttaagtcacgaattgaagcgatcaacactcgtgtacttgtcgcgcgtacggtgggtgggcctattggatatagaccccgccgttggggctaacaggaggaagagacagcgtgggatcaaaagtaaacatattggaagagcaagctccttgtagccatgtagggctaaccaccaaaaatgatgccatgatagatggtatcaggaggcaaagagagattgggctgggcaatggcgagggagtgctttatatgacgcttagctaatgttgccccttgcgttcttcaaccaacctgctttccagttattctgaagaaaaagctctctagacagtaatgaaacaacccaaaacgaggaacagatagaaataatcaacttttgaaattaaccaggatgagactttgccccgacgccttaacggaccatgatgaaaagcgtcgcatcaaatatacacatgtagtcgaaacatcatcccgagggatatcaagtctagaaatagcacgacgaaacaaaaaaaaaccccctatgcaaacagcttccttgtgtccaacgcatccaccttccgcacagagttctcggacagtcctagatcggagcgcttggccacccgatcagtctggccgtctcggcgctgggagtaacggccagccttgccctgtcggatgtcgctacggacttggttggggctgacgtactccttgttctcgtagatgacgggtccaccaaagctgccttcgagaatcacaatgggggtcagaacgaaccgggggccaatctcgactagagaaacctcgggcagggcgttgtccttgctcttcggtacaggcttgatagtctcttccccatcctttttcttgccagcctcagactcgcggatctcatagacgcgaatccagatcttgccgtccactccaaagataccaatgatgcggtcgacgaatggcttcatgcctctgacaccacgtttaggcacacagaagactccgcgcagcatctcccgaacaagcgcacggtattcgctaccaggagcgcccatatctggaccttgctcgtcgaaggagcgatcgaacacgaccaagccgcggccgcccttcaagcaattccctgcaaatccagcgccgagctcgcccattgtgtgcaagttgttaagatggaacttaatagtgggaccattaggagggcgcgaaagccagagataaagatcctggccgttcttcttggcctcgaggaagaagataacgttgcacgaatgcaggtcggcaagagagttcaggaggaggttgtatccagcggccttctttttcgtgtcgagcttagtttctttgtgagcatgagggaggaggccgcagatatcggacatgaggtgtcggtggctagagaaaaaaaacaaattatcagatcagtaaatccttctagtatatctcaaggcgcaatattcataccggtaagaagcgcctctggaagtcaagataagtacccgggtcttgggcataaatccagaagcaagctgtttcttcacaacctcagctgcctcgccatcgtcggactcttcctcttcgctatcggtggtgtcgtcttccgcatcgaggagctcctccatctggatgtcctcgtcggacatatcctcagtaggctgtctagccgccttctttgagacactcttgtagactgatgccatgatgacggttgattgtgttaaaaaatggaattgaaattgatcgtgcaaaagacggccgagatcaaaaagttgatggcagaatattttttgtttacaccgccctgaaccttgctatgtcacgtgtcatatgggctactgattcatttgccgttgtttaccgccctgttttcctgccaaacattcatctggggattactcaaccttgctttggtcttattacttgctacccacatagttgcatacatatgtagcctttcatactggccaccttacgatttgcttgcctaatttcactccaaaaggtagactgaaattcaacgaaccgaaaaatatatatttcttgtctaaattgagtcgacaacacaacagagcgttaactattctcgattacagccattttgtttcccaaagattgatataataagtggcagacttgtgcattggctcaatattttgactttgaattggtcaatttggagagctgacgagattcagtcaagtaaaaggcgagtcagtatgacggaaagttcaacgctctttgcaggtttgcaaagccctcttgtgtgaccttcaagccggcaatggtatttgcaaattccaatttcttccgaaaatcccaatcatgatcccgatatacgagaccgtatagcaagccagcattaaatgtatctccagctcctatggtgctatagactatcagtatggtctaatgtgtgctgtggtatatcggaaaggtcaaaactcactcgacgactcccatttcctcagtatgtgccgggacatgagcaaatttgccggtctttggttcaagtgctgcagccccgtcatgaccccaagtacagcacagcaaggatctttaaacgacaggttagattatttctctggggacttgaacagtaaagcctacgctcggcttgtcttcaatgattgatcccgcaagcaatcctcagcgcatgtatatccatttttctgctcaactattagatgtgcttgaaaaacgtcgaaaataaatcttacctgggcccagcccttcgagtagataacaacgtctgctgcgtctgcaagcccctgcaagcctggacgacctggcttttcaatctcaacactgattttagcctctggaaaatgcatccgaatataatgaatacattccaatgtgacatctggtgcacggccctgagtgcgagttagcatgattcatgactagttgagcaccttgtcaacatttaaggtacctcaaaatgaaaccagggtcgatcagttacggcatgtaagggctcaacagctgctgcgaactcggggtgggtcatttcgggtagctcgttgtaattgacaatcgtcctactaccggtggcctggctcgtaatgatgtaactagaagctggctcactgaacgactctcggtaaatgcatttatctagccaaacaccatttcctaggcttgattgtatttgttgagatgccatggatgatttggagggaaggacagcaatgagatttaaagatgattcggcactcgacggcctatattgtaacaattgactcaaaacttccagagtgtttggacaattcccaccgcgccggcgactgatcctggttgcacgtagtttctcatcttcatttgggtaatagggggctctaccaaagcatgtgaatactggactttttaaatgccaatttcaagacagctgaaagaactcacgttagaattgtgtcaaggtagcacgcccctatagccactaaagccatgatgataaatccggcgagaatatatctccgtatttcggaaagaggagttagtattagggccgattgatcgtttatctaatgaatgtagttgatcgagtcgaggataaccgctgctttctaaggttaggtccacgggtggggttaaattagtcagcttgtcattaagctcactcgtgtggtacaattgtgtttgtcttagcacaaaaagccgtttcctagttttgcagtacataccacataaggttcacaatgaatcaaagagtctgaagctttcgtacacaatacaggaaataatttcatgtagtcagtatctaaaatagactagcaatcctcttcttgccactgagaagattagtcgcggactagggtaatacgcatcacgtgctcatgagaaagagcgcacgtgcccctttgcttaatacaactacctaaccttggaagtaggtatctatttgtcttcgcgtgctttctaaaaagccataaagaaatgactgtaaacatcaagtttcattgaagtgcaggtataaagaagtaggcgggatactgcaggacgaattgggggttgaataacgcaaactagattgctatacccgtacctggaggcatgcgattcctacaggtattattgtctcctacatttgcaaagtacaaagcaagcattgatgtggctggcaaacaattctcatgtcctaatgatcctttttcattctataccagttatatagccgatctaaactgttcatgaatcctcccagtgtcctcacaacctcatttttatcattctgtcactgagaccattttttcaaccatgggtcagcggcacaaagttttagagactgacactcccactgctaagttcctctacacaatcatcaagcaattggacttgaagtcggtcagtttattacccaactattaactgaagattgatttaatcttatctgaatatgataggtcgattggaatcgggtcgcctccgatgtcgaagtctccaatggtcatgccgctcgcatgcggtactcccgcttccgacagcagatggaaggaaacacaggggcaagcaagccaaagcgaaagagcaagaagggaaagaccatggatccccctgctgagatgcaaggcatatttccaatggctccgccgctcatgatgcccaccatggcatcgattgattcttctcttcctggcaatccctttgtaaaatgcgagcctggcattcagggtaatgcgaacctacagagctttatgcaacaatctccgcagttgatgttggaggctagcgccgaaggacagtattactttcctcaggattttgcctcgatgcagttccagctggcgtcaagcataccatcagcgataccatcacctagccccgcaagatcatcgtccttcatgcaaaatccataccagttcccgacaatgtcaactggctatcctttttcatcgccaggcactcaatctgggtttgatttgcgggactttgaccaaatgaaccctttcaccagttctgctccagccatcagctgggaaccacgctctccttctcgccaggaaggcccgaccatgaaagccgaagaaggacaaaaacagaccgaggaagaaatgtcgagcacaggaaatcaggaagatggtcatgttgttgtcaaagttgaaaagaatctagaatgattatgttggagactagaagggcctcgttcatatgttcattagctagtactctcgttattactaccaactatgctgatttagtcttgtgctctctctcacttgccaaagctaaacatagtattgtgcagaatttctcagaaagcagatggtcatctttatttaggcgtgtactcatagaccaatctgtgatagagtcatgagcgttatttcaagggaggtctctcttttagggaattttttataagagaaggctgagaagccaagcctggaccttaggttaaagttataatgcaggtcatcaacgtgcactaacgcgacaaaccttgtattatgtcactgctagattgccaaaagaatatactaagagaaaccagtcgctgattaatcgatgctattgaacaatgtatttaaccgtctcctggggcgacttttttctcttcgtcatttttcttgcaattgagaattcggtttattttcatatctaccctcattgaaggaggttgtgaacttccttccaatattgccgaaataatgccttcttacaagaacaacccttcggatgaagagtatctagactcgatcaagaaacataccgacaaggaaaccaacaatgtacgatacatcgacaacttcagtgaaactttcagttgaacccacagtcgacatactaaaacttgagccacaggtcaatctcgcccgcgtagccaaggattttagctatgctagtggaaagtcgtttcagaagaagtatgccaagctaaagaaagcacacaatctgaccaacggccatatctatggcgattacaaggcaagccgacttctatccgtcctaataagattgaaactaattttctcggtcagcctgaggcggctcagactcccccgaagaaagccatcaagaccgtcacggagattgtgcgtgaggctggggaagcatctgtaaaccgacgttccgccatgctgaagggcaaaggctcggagaaggataagaagaagcaagcttgacttgtcaaaacttgagtgaaagagttcttcggtgtgcgaggattctacgatcaggctgaaggatgggcgcccaaaagatgatagcctctttggaagtgtacttcttgatctttagatgaaatactgaggagaccgtgtagtaaaattggcgaaaattaggttacgaacttcgttaaaaggcgtcctcttctctcctctcggttctcaaaacggtataactacgagcgagcgaaatgtgaaaaccctaaaatcatagggagtggttcaatttggtttaaaagacaatccttcaatttggaatcgacccagacgatatttattcctagtactttatatataaagagggaataccggcttttgatacttgatggccacggaagtcatttaatacctgaattgaacgaaatttgcgagtaaaataaggtgataccgatatgtatactagcgcattcatcttatcttttgcaacctttaaatattagctgttttgcggtactgaaacgtgcgtacggtcggatggttgaatttaagatacggagtaggattaactatattaataaacttgacttcctcgaagtatacccccttctacgaattgaagcttttaaatcggagacgattaaaaatagcttcttagctgctggtctagtaccacatgtgctgaagaacccagtgtccggcatacccgacgggtctgcttttgccagtcgcactgagacgatgctatttcttgcgccgtcgaccgtcaaggcatccaagaagtcgtatttgtgccgctgggctggctgcaagacgtgcgctgtcggtccggatgttgtcactgtgcacgccgactgtctggaggtgtatctggagcatgcggcaagctatgaggagcggaaggagccgacaaaggaaaaggttggaaatgaggacaaggaaactggcaaaggagatgacaagaataaaaaggatacaacagacgataagaagataaacgaaacggaaaatgccgccctgcagcgcctctggatcgcctcttcgtggcgcacgccgtggaaaaaggcgcccttcctctccctgctccagtgcgacaacgcgcggatgtccatgcccagtccagccttgttacaccgccttggtctgcctggtatggcgcgcatgccaccagagctggccagtaccgtcagggacctgagcaaggatagtcctttgtggcggctcaacgcggccgcacgcctggcgctgtcgcttgccgagtacgagaagacggagacctacggtgacgaccctgccgcactgcccgcgtctatcctactatccgaggtggaagcctgggagagaggccggctgctggtacgccgtgtggtatcagacgagaagaaacctgagttggctgaggagaccattgcaacggacagcttcatccgcctcgcgatcgacacgtacggcctgctacacatcaagcggctgccggcccgtccggcctacaacggcaccacgtccgccggtaagctggcctatacgctctgcgaggcgaagacactaaacggtgccatgttcatttccaggtgtgtattggaggctgcaattggtgaaacggacagccggtagaatgctaacgacccagctcggcctcattgagctccccgcgggcctccccggcctgcaaatctgggacacgcctgcgccgccgcccatcgagggcgtcgcttatatgcgaaaacacctgaagcgcgtcagccccacgtcgtaccttcatgtggtcgaccttgaagctatcaccggtttgactcttctgtccgacggcaacgtgctaggcctccacgctcacacagtcgccgagccatccgccacagttaccgccgcccgtatggcgttgcccaccgcgcgggttgcatggcagtatatgtcactggcgcccgggatcgcatcgaggccgtaggcgtgcgtaaggagggctacagtccgcaactaactcaggacgaactgacgctcatggtgagttttgaacgctgcggacgatgctgtagagaaaaatggtttgagagacgcttatattaattttccccgccagttccgcaagcggctctctggcgacacgctcctcggctacagcttttacaactcaccctccgaaaccatccttaccgcgccttcagaacagccgcgagcgcttgtctacagtgctgtcaatactatcaatggcgtcattaccgacgtcggcgtctacagcgtggccgccgcgcccgacgtcaccgcggctgcttcggctaccagcgtgcgaaacggagcgcgccgccactgctttaaccactcggcttacccggatgagcagctcaccgaggacgccttccagagcaacgtgccgttggccggcgtcacgtatatgcaggtatacaccaccaaggatactggcctcctgcgcggcatcatcctgacctacgacaacggtggacagcgcgcactcggcatgtgctgcgtcgccaccgacatcgatgccgtgcgcgagtatgcccgccctgtacgcctctgctttaagagtaaccgcgagacgggcgtgacgcgcttgcgtgtcatcacagagggcgacctaggtacgccagccgccgatggccacgacgactgcgcaggcggcgaggatcccggcgagggcgaggaggccaatgacccgtatgccgttgtgcgcgcgtgctgtctcatgaccggccgcctcgagtttgccgtcgacagcgacaggctttgcctggaacactttgccgaggaggaagagccggacaaggagaaggacccagacgacgaagatgtggatgtgtggtgatgggaggtggacaccgccagcactatcaccgttggagttgaactatcttgtgttaagccattagggaaatcacgactacgacctcacgtctaaaacgaggtaaaattggattttaactcatcctgtaaatctatacaactagctgagcaacatccaattttttttaatttatttcctttactcgcttctattttcaaagttgtgatgttgtcgtcgattcctacttcctcgttaaatatgttaaggacgggcgggtgtgtctttaggggcccgcctctggatttagttttctttttttttgttattttgtgcctccttttccagccttttatggacagtgagctaagccttcaaaatgtatctttgctaggtaatggtatcattcgagtcttcaacaatgataatggggccaatctcctcggccgtgacagactgccaggaagggtctccggggatttcaagatacttgtcagagcggtcgaactctttggcattcttcacaatgctgaagtagtatctcctgctgctggccgtcaataattgcactaaaactcatcaaatccttgaagaacttacgctgcttcggggctcatgttgatgccaatatcaagtgagacattgtcccagtttatctatagcagccagcacgttagcaggtatattggattgtaggaacagattgtgaacatggagatattgtgccgaaactgaattggatgctacgtacctttgccttaaggcgatggcctgttcctcgggcgtattaacggaagtcattctagtaagaagatgaagctgagtcggatgttgttcgatgtaaagaagcacgtgatgctagaagttaatacgtagaatgtgagaagagcgatggagctaaggacttccagttgtctttagatagccattcaacgcgcattttgcttgatctgctttcagctgacaggtgttggctcctcccttaaactaacgtcactcattttgcctacatacagctttggataacaagaaaaatctgtgatgttcaatattataaaagatgacatggttatagtatcttaccaagtagggtgacaaaagtactttgattggcctctcctaggcatacttttgaagaaaattttgatatcttttatatttctaagagaataataatgatatgaagccagacaccttgaagccaagcagtcaaaattcatatctatgtctcttggtaaggcatgcattgcccatggtgtgactcaacataggcaacgggtacagaggtaacgaatttcattcataaagtcaaacaaacagtaggattgaacttatcaaaggggtatccttccaaataaacagaaaaaaaaagctgcaaagtgcatatcacatcacaaatgggtagagacagctaatatcttgacataaatctaagagagatcttcgttgagaagcgttatatgtctgccatgacagattccacgatcttccgcttgtatttcgacaaagcctggtcctttttgtgcatctgagtacggagtcttgtgtaacgctgcttccatgttgcctcggaaacaggatgactagaatcatcatcgtcaaaatccaggtttgccgtcttatcattgtcaatattctcattactcgggcccataatcacgtttgcatggtcaggcgaatccttccttcccatactaggattgagttttgcgagcgtgatttgcatcgaaaactggcttgaagttttgtactcatggaagacggtatagtggatatcactgaatgattctttagtggcagggccattcctatcttcatcgctgcttggtgtcgcacgttcaacgttgataaccagtgaccctggattagtgcctgcgagtccgaaatgatgaccaacaccaagatgtaaggccagtagcagcgaaggagtcccaaggtaaaactgtgaatataatgacgacaaattgatcaccatctccgaagccagagcagccgcctcgttaggagcaagattcgccgtctgccctgtcagcctagcacgaagaagctcggcagaaagtgcatgaacaacctcatcaatggagggattcggagtaatgaccgcatttctttgccccccagaagaagatatttgagtagtgataccattttttgtggtatctgtggtaacatgttggcggggctcattggacccttcagacccgggaacgacagcaccattcacaccattgactactagtctcggtggagaggcaagtctaacaggcgcccctgaatgttgaggaacctgcagttgaagtctattgggcctcccctgagagatagatgttgaaggattattgtgagttggggtctgaaatatttggggcggatttctgtcaagggcaattgaaggagcctgagtattaggattgggtgcctgcgatgattcccggctaggattgacctggaatgtagaaaaggaacccgatgatgaccctttatttggtggccttcctcggcctttcccggctgataatccgttgctattcggccaagcagacgaaactgcagggccatgtcgtcttctggaacgggttttttcacccgttgacggagtaactgcggaccgtggttccgcagacttgagtacatctgatggtagatgacttcggggaatgatagcagactgtggataactagcaggagaggcatcccgttcgggatgtctccagcgtatatctggattttgctggtccggccttgaactattcggaaacgatgatgtcgccggtatccaggggtcattggattcagcatcatcaggaaatgcactgaatggaatcgcactctgtgggaatgccacggagtgggactgaaaactaccctgctgctgggcgcccacagatgtgtccaactggggccgcttgattgctctatcttcctcggtgtacctatcctcgacccttttccttcccctctttggcttccattgtggcacaagtgccctgagtgcaagatcctcttccaataatacaccatcgcgagattcgctaacaaaaggaccagatggtgggagctgtgtatagtaagaatgaggcagtcccatacaatattcaaagaaagcatcaatatgcatagcacgcatccatcgctgggtgagattagcaaggtgaaatttgggttggaagcttggcagacgtactttgaggcgaacagtgtactgttgcaccttctgggtgctttgtttcttttcaaggcaaggtggttcaacacccaactcaattgctaattgaatccaggtcttcaactcttcattctgcagccgccttcgaatgaggccatatagggtaaagatgttgaagctttttccatcactgcgcggcagacaccggaaggtctttctcagatctgatgtgtcaaccgaggatggaacattaggattgcagtacaagataaatgaaacataggcgtcatcaatcgtttcatcagtaatatcccgtgacggaagagctcgggaatctgcgtgatcggcagaatctttcataggctgatggcgacgaggatcaaaaactggcggagacatggaggccccggagcgattggccgatgatgggggtatagcagaatgcatgcccctcggggaagactgtaagctcctgggggtttctcttcgctgtaagggaggcgatttgttgatatctatttgactacgagagcttcccaaggaggaagcactctgcaacgtcgattccaaggtcggaggatatcgcgcatattgttgaatgaccatttgcggtctgccgagctcaccacggttggagcgatcggtagagtccatcatgagaggaaatgatgttttcatctgaatcttgacgactcggagtgtcagaactctatgtttaattgtagaatagagctagacacgcgatgcaggcaaataatcatgcggatcctatgtcgcataggcaagccgtcattatcgtcaaatcaggaaccgcagcatagatgtaggctatcttcaacacaaaatgatcggtgaatgaatacaaagagagagtgaagagaatctgattctgaacagcaatgcgccgatggtgtagggttccaggaggtttcccctcgaggtggctggaagcgcccatctttaaagctcaagctgagaatctattttggggccatctagtgctccctaatgaggactagtgttgtggcctgagggcggggttcatgcctggatatcacgtgtagactaagcctaattggcgttagcgcccattggcacctaccaggtgttatcgataagcttgtcgtcttggcattcttccaaggttggcctcttcgacctcatccgtcaaaggaaccggactcccccggactgtggcaaggttcaatttgaatgataattatttcagaattttcgcgccacaagcctagaaatattcatctccggcttgtattgttgcgcgcgcgacgtgcgtacaatgtcgctcgggtctctgctacccactctcttatcctagcgcgaccttatccgtcatggcgccgccctcgagttcgcgctcgaggtccactcgccctacgcggtccagccgcacaaaggtgcagacctaccacgaggaaagctcctctgacgatgaatcggaaggtttgcgtagctcaaggcgtgcctcgttatctcttcgctcgcgaatgccgaaatcctatcgtgaagattcaacggatgatagctttgattttgatggagctgtggaagaccaggagtccgaagcatcggtatctgcgccgatcgacaccccaaatccgaacaccgaatctgtgcctactcgtccttccaaacccaaacgtcctcaacgcgctgcgaccacctcgaagccaaagcagactaaacgatcgaaacccaccagtcaagttgggagagccttgcataaacgtgtcaaggcagatgaggatgacccgatatttctgggatccggtgtcattcctccttggcaaactctcccctaccaaattcttcttgacattttcttgcgcgcgtcgtatccattactcgacgaaagccgttccgcccgcaatgactctgtcaagtggctagtcaatgtcgctctactatgtcgaagctttcacgaacctgcgctagccgcgctctatcactgcccccctcttcttcctgcctacaagagccatgtgctcctctctttgctggcacgaccgcaagagtccctctcgatgaattactctagcaagatcaagcaactccatgttgaggttgaaccagtcctcctctataagagtggaccctacggatacctcgaccttgctcagctgattgaaaagacacctcgtttacacacggtaagactgtatcacagagatgattacacagtgggaatacccccatggcacattgctcaatcaaagtggacttatccagacgccatcttttccgccatcgagacccgtggcattacccttcgtaactgggactggaacagtcgctttttagaaaccgacgagcttgtcagattgatggtgagaatgcattcgctgcgtgccttccagggtctcaggcagctgaagttgctccactttgacaattccaacgaggaaacctccgctgccaaggaggctgctctccttgaagcccttgatatgcttccagagcttcagcgactggattttattgaaagctcattggtcagcggggaaatcctggccaacctaccaaatacactccgttcactcactctgaacaactgtgatcgattgtggtcatcagatctaacagcctatttgtccttgcatggcaccaatctccgggagctcagtctcagccacaatcgccatctcaacatgtctttcatccaaactctggctcagtgctgtgagagcctcgaagttttcaaaatggacctttctatgcatgatgcgtccagctatcacgatgtcgagccgcacttcgaagatctacttgtcgaaaccgaagttcccacgtggccagtgaaacttcaagaaatcgagctcactcagttacgcaaatgggacgacgctactgcggaggtctttttcacctctttggtaaacgcggcaccgcaacttcgtgatctacgtcgattggtcataagtgcaatcctgaagattggttggcgtgaccgtgccacttttcgcgagcggtggatcggtatgctcgagaaggttttcctgcgacacagcatgccgccagaccccaacctccgctcccttcagaagcgctcgctcaaacccaccacattcatcacagcgaatgaccccgatgaacttggtgttggagttgatgatccacggccatccacggctgatggtggcccgtccagttcttctaaacgccaaagcactcggctggcacatcagaagttcaacataattggcgatgctgctagcagttcttcgttggtgcagcctgaaaccaggaagatacagggaatgtgcgatattgttaacattcggatcgacaaccagcgaccgaccgaactgcaattcaacgagaatgattttcttgacgatgaactcagtggcgacgaggactgggctggcgatgacttctagccaatcctagggagttcgggtaacaagctatggcgaagtcccaaccacagtacctttctttgtatttatagccatgtcgtctctcggagctgtattatgaccctagacgaacaggttcttttttttatgccgatatgtttctgggatctggcgctggggtttcttattcatttggaagggggttaaacaggagctactattcgatactctctatacaattaatacctagcgattcatgcgactaagtatttggtgcggaatacatgattgcttgctggaccataggcatacaacatgtcgtagcagttgcgttcatgcgttgttcactcggtctgtgcacgacgatccaaagccaagccccacgagatcgtcttatcggcgagtctcgttgaacctcaccttacatctgtttattcctacacctttgtttggtgtataattacattttatccgttcagatccagaatttggatgtcttgtgcttttcctttcgacattctgacatcggctggatcctgttaggtccaagatggcgcctgaggcccctgcggacaccgcaggcccatcctccccaccaccccaacttccagaaggctggtaagtcaaccccaaaagtcaaagaattttccagctgtattctaacaatcatatcggataggctccctcaatgggaaggtgtcggacggaaatggtattacgtacagcggacgactgggaagtcgcaatgggagattccgaccgaaccgatcgttttgaccccgtcaacaacaccgacgccgagcggggcagggctatcgcaggagccaaaatcgtatccgacaagcaacaatactcgagagttggagtccacggacagaatggcgggcgagatgtactctgcggccgacagtgcgaaaatttccgtagggaatcgcgctcattatgtctgcgtaagcattgcaagaatggcactgatggtgggatagaactcccttggctcccagatatatgggcagtcggaaaatccaacttatgggtcttccggggtaccgggttggtattcgaatcagacgggtcaacacttgcccggcagatatgagcagcagatggctgcaaacgcagccggatatggcccggtatgttcaaatactcgcgtcattcattgattggccgtggcgctgatttgcctctagaatccgttgcaccagggtcctgttggacatttgaatggtgttcagccggcgttctatggaagccaaacacatccaggttatcaaatcacgggtccacaccacataggccaaagtatctcctcatcaatgtggggtaataattcaggtacctatcagggaaacccaggcagttataacatgacacaacatgcacaatccttccaaggattctctgctgatcctgttggattgcataatcaccagccaccagcatcctggacaataaccagcaatccacagggggaaatggcaaggtcaattggcggagcttccgattcccaaccacagtggcaattggaaccacagcaaggtcatttgaatggctctggtgagggtgtcccgatgaacctacacccatcaaacatgactaagcccttctttgggtcttactcatcgaaccagcatgcggagccgtcttcgagagaattcgctcgtcgtgtctcgaatccttctcttgttcaggaaggccaaccctaccaaacttccgcggagaacttccacaaccattcaccgcactccatggttgaacaaggtagattcggacaaggccaggacccacgttcccattcacagcgtactacgtcggaccctgctttgcagggattctcaccgctgcaacatgtacagagtcaatatcaacagcagcacatgatacgaaaacagtcaggaccacaccaagccaatattgctcaaggccatcagcaatatcacaatccaatcgcacaagtcggtgccaaccaatacgtttcgcagcatcaatttggtcccaacggcgggccgacgggtttccctgaaacaacgcatgttcagcaagtcccttatcaccagtcgagtcattatcccgagcgtattgaacattcacccgggcagacaagaagaggttcagagtcacactttgtcagtgggccgtggacctccacgccgccttctactggacagtactaggcaacaatttgttgttcacgttcattattatggtcaacgggaacaaaggttttaatttctttttttgagcggtttctatgggcatgtctatcttctgcgctgtttgtgtttcagtatagattccccagtcgatataattcgttgcttcaattgagttttgtgccaaacaacattccgtctagctactacaaattcccgtgcctgaacacattacagctgcaagcattacacaaatcaagtattaggggacttcttgaacctggaagtatagcggcctacataatatcaggaacgtcatgtaatccaccgcctgggatagaacccaataagtacatagcatgaggttcaagtcacagatttcatcttgatattacaaaggtcattgctcgcgcggaggaaatctcacaaacggcatgtgaggaagattttcattgttctcttcattttctctaccacttcttctttctacgacatcaccaatatctcttggtcgcccaatcatccccccttccatcccacgagcttttgctatcacaatggctagtacctgggatcacgaaagagacaagaaggtaagtttgctcttttcagggggtcagcagcgacaccccccgggatacaagttcccagcattggcaaggtctcggtatcaatagctgataattgatagttgcttttagccattatagccgttcattctccgctggattatgccgcaattgccaaggcgatgggacagggtaagtatatacctgaggactatacactgaagccacaattcccaccctaccctttatcctacatgaccattatacgaactcatctgacgaagtacaggcgacagcactgccgctgtgaagaagcacgtctacactctaaaagcccgtcagcgagcaatctccgcacaatcttttgccaaggccaagaccgacaaacccactgactgtggcgacaagggtaccaaaaccaccaccaagcgcaagattgactcgcccacaaagtctgaagttaacgccattgtcgagaatcaggacgaggatgggtttgaacccagcgccagccccaataagcagcgcaagctctaagatcttccgcttcttgggcctggcattcattgggaggtaatgacttacattctgatttttatgcagcgttttctgccgcatagcgaggaaagatgtttttcggcctttggtctagggctcttaggtactttgttatctgcgtgatgtcttgaaacacagcacctttttcgttaatatccatttcccaagaaagacgtagatttccttcgtcgcagtagccccccgatgccttttcagtatgaaaggtactaagtatctacgtagaaccaggaaatataacctcaccgttgttttatgctacttctgacaacccaaggaactgatccaagtaatggtatgttttttaatctttggttatcatcttaagattttcccgtttcttcatatcctcctactcatatatatagttccacttcataaagtcaattaacatcccactcttagtaattttagagatggcgatggaaagtaaaagaggatagagccacttgtttgtgccccgttcagtttcagtcgaacattccccctttcactctccataaattcttcctctctcttagaaacagtctcctcatttcatatcaccactattttactagccggtacgttcattttcaatttaatctatgagcaggatatacttctaagcatcttgagattcaatttatgctcttgatttactcgtcacttttgttcataaagatactgatatcctttgcctagctcgttaacgaccgaagcaacaatgaaggtcacgtggaatgaaaaggccgatgccaaggtaagttcatatttaccttcgttatcgatttaccattggtttgttccatatccttgatagtcttggtgactgcggttcaagcggtcaccttgcggccttcactttgacgttggtgtgacccgtgacggcgatggtttaactccaatgctttaatattggtctagctgtctcaacatcatcgttgtatttcaataattaaccatcataactccagttactggccggcatactcgccaataatcctaccccgattgatttcaatgctcttgctgagtatatgggtgatggttagtgctaccctgagaacccccaactcccatactgcagtctttactcggactatagcgcatattgtttatgttatgcactttattcatggccgtcacccaaccaactacattcccactggtcctctcccgtttgatctttgccatacacaattcaacttggaaatatgtttcaatcgcctataccctctacccaacatttttcgggctaataaaggaactatgctaagctagacttataggagtcacagcctgcgccatccggcaccgggtaactcgccttcgggctaaggctgcagagatgaatgatggcagtagcacctcttcccctgcttcgcccgtgacaaggaagcgccagcgcaggactccaaagaagtctgcaaaggttgcaccggcaaagcacaaggatgctgatcccgaatctggtggagaaggcccagttcccgaggatgaagaaatcgacggtgaagataccaatgacaagaagtgcaaaataaagcacgaggagactgaagagtaggtttctttaatttgtgaggatacagatggaaactctgagtactaattttgtttgatcaaggaccttcttccttgacggtatcgtcaaagaggatgaagattcctcggatctctaaacgccaccaccgcgactcttcacagcgaagccctaacgcgtcgatgtggtgaaggtgtcagcatggagatagtatctgaattttagctggggaagtttttcagaatctcacaaccggcaggaatactagcatatgcaaaagggttatgagcagatgaatttacagcgaacaatgagctcgactatacgtgtctccttgctcgtaataaaatacttttactgatcccagccattatccttttaacttcatacgacaagaacaggataaaagtagacgacaaaaaaagtcggctgtcaattcagctatgtccttcggcgcaatccaaataaatgggcaccgggcttttttttgtatttttttctttttccccccatcacctcacggtggaaacaaaccgagttgttcatcaaccttttttttttcgatttttccttcttttctgacgaccgggtcacacgcattgttggggaataataaagcaccccaaaagaaacaaggagacccaacgtcaagtaaaacgcaaattcgaatattgaccacgggggctcaagtcaccgaaatctcaagcgactgacatgaatccgccttgagaatgaccattgagctaattgagctggtcatcggagtaggcgtcctcctcgttgtactcggtccattcaggatcgacctttttgttgtcgacatcgggggatccctccttgaggttccactgaagaaggggggcgagaccctccaggccggcttcctgcttgatagcggactcatcgagagaatgctcgtgcttcgcaggcaattcttcctcttccctgacattgacttggtcttcatcggcgatggcgttctttgtgacgcgcttgcgcttgcgggaagagccagcaggagtaggtgtctcattggcctttttgcgaggggcacgcttctttggagtaaccgggctagagggtccagacaccgccgcgacattgccattacgaacgttctccctgattttgttgagacgttccttgagagcacgaggtgttggcctgtgatcctcgtcctcgacggctgatcaaatgttagattgaacatttccagtgatatagagattagttgtggctgcagaacgaaagacttacgccaggcctcggcaaccttggccacatcgacactcaagtcatgggtctcgaggattttggcaaggagctttatttgtcagtcacaattgtcattgccagatatgcatgcagcccatgaacatagaaagtcccagcagacttggaatggggaaagaatcttgaaaaagacaaggaaagactttcgcaaacaaatttgtccaagcagctgaggatgatcaaagcaaaagtcaatctgaaaggcatttgatatggtcatgcaggaaagtatgaatatccacacccctccttagacaaaagcccaggacaattcaaaagtcatagcgaagtgaaaaagaaactcacagtttggtcagcgatcgaatcccatttcactttacccatcttggcggtgtgaacagtttgcggtagatagtatggcaggataaatgtaagcttgatatgtttcaaatgcaagtcggttatgttctcgtgaatgaataagaatggttccgagttgcgttgggtagaagagaggaggaggaggaggaggaggaggaagatccgagcaaacaatttaaagggatcagattaacgcgactggtcgtagattctcggcgcttagtcgtcgaggcaaacgatacaaacgaacctacgcagacaatgtgacttcacaggtatgatttcaggtggaaatccatcttagttgtgtagatacactgcgtagtggttatccaacgttggttgcccatgatggcccaggcattaaaatccagatatacatgaatacagtatgtagcttctacagttcttcgtttgtcagtatttacaattatgtttacacaacctaggatctgaacttgggataactatacagtgcagtggtggattctagtacatgatgactaagcggcaccactgaggctaacgcagacaccttccacttctcttcttggtagtcaccccattgtgttctcctctctagtaccctactgatcccagtgacgactatgctctcatatttgtttcataggcagagctgtcggtgcccctgcttgtcccctcttcaataggtgtctaagcaggagccctaacgctagactcgattaggcaatacatacatcaaatttacatacaacgctagaggatccaccaacggcgtagatcaacctctctgcaattctaacggccctgtaggaaatcggagactaccttcattaaaatagactaacaagtgatctgtctgatttggagggaaataactatgtaggtggctattatggcgggagggaatggtttgtcctcagttcctcgtttggtccgtcccacatcgctctgatctctaaacaatattcatatacgacattatatattccagtcattcctctgggcatctttaggcctgttcattttgcgacacgtcttctcataatccgagttggggccagtggtaagtcatcttgcccagataagcctggcgacgcaagaagacggttgctgactttattcactccatgcttagatattgctgaattacgggcgttcttctcaggctcattttgctcaactgactcacggatgcggttgaatccagcagggtttcgtttacccggataaatgggctgcacattttcataagctccagaggagtcggacaaagggtcggggccagagtcgactattccatcagcgggagaggctagctggtgatgcaatcgtttggagacaagtttggtacgtctcattgtcgaaggagatcggtgacggtatttaggctgcgatacacgttggggcgatgttgatcgagtgcgaggctgagatatgagaagggattcaaggttccgactggtgtcttgggttggctctgtaacacccgggcttctttcgatttgagacaaccccagggtattcgaaccccgcgggtgcaaggaaggcttttgtgacagcgtgagttgtttcctgacgtatgaattttgttccgatagggattgatgagaaatatcttgatgattaggttcaatcaccaagtcctcaatcccgagcttgctagcatgagaagcatccagtcgctggtcaacttctggagacttctgccgccaacctgcagcccgccgcttcacagacaaccatgaatactcgcgaccggtctcctcgtgaaaccgtgacgcgacatccaaccagaacttttttgctggcaactcgccattggacaccgcgggcaatttttgttcatagagtcttttcagaacgccctcttgcgcaagggtaagtttcttgccacggccggtgctggggcggtgatcgactactatatcgttgagtttggtcccacgggctgacgcaaaatctattgaggccatcgctggagccggtgccgagttgtggggtccttggtttaattgacgatcatctggtcttgttcatggggacgtcacgctgccacccggtcggatcgattgacttgaattcaaatggatagcccactggacccacagatcaaggagattaagaatgtcagtggctagattcgagccgaaggaagcgtggatgacactggaagtgggtcggaaagatcggaggccnnnnnnnnnnnnnnnnnnnnnnnnnnnnnnnnnnnnnnnnnnnnnnnnnnnnnnnnnnnnnnnnnnnnnnnnnnnnnnnnnnnnnnnnnnnnnnnnnnggcgcgccgcgtgtcgcgtcgcgtttaccccgcgttttcaatacggtcacgtgattatcccaaattgattactccgcataggtttcaattctatctagcacaatctcgagcacgtttccactcataaagagtgttgcgggggactccgactggcgatacaattggctttggacctggagatgatgataactcaacacacaatatagcagttcgagcgcttgtgtacagaatatcagcagcgtccttgatcagcttcagaccatgtgaacaagcttagcatctgtagggtcttcttcaacatggacattcagattcaatgtgaggggtatatacgtatatgccaacgatttgaacatgtgtcactcaataagcactctcaagaatacctcccaacgccaatagacaagtaaaattccacgtaatcagcattcatcaactcaagagatcaaatctgtcggaccacctaatggcaaagctgaatccattgtgcaataatatcctccatgtcatgcgcaataccccactgtgaagacaagcaccggaaaagcttttgcatagagttgagctcgtaaagcagattcctgacaacgccaccaataggaagtggaagagaggaagagctatttacattctcgacaaagcgctttgtctccgagccagatcgaggtcggatatcctcgtcacccaggttgagatccgaatgcgatagcaatgcatcttgccaaacgatgttgcgaggtaaattcacagtggcgactcctgcgagtgaaaggacaacgtatattgtcgctgctgcaaacagggagctaggcatatgcacgacatgcgcgcggccacgtggtaattgctccacgatatcttgaatggcgaccgcatggaggacggcccgccgcgcgtcttctgaattagcccatttgattagatcaaagcccgggcggacggttccacatccaccggagatgtgttggatgatgttgtagcgcgagcagacgtggcgggagaggacggtcgagttgatcattgtatctaggcagactgtgtgccaacgcaggagaatttcgagtctctctgctgcggtgaagtgaatgctcatggatattgtctcgtggacttgagctaaagctcggcggacgtcagattggctaggaactcctacggctagttcattgtcatcaaaatcggagatcaaggactggagcccttctagcaccacacgcagtgcgaaggcagagaaatggtactctagagtccggaagctccccaccggtgggaaaagggagcggaaaattgtcctaaatgaggactgatctggttcttgggggtgcatgtgggccaaccattcatcggcagtgccggcatcaaaggcttcctcgctacttgggagggtgagggggtttcccacatgacgagaggaggcaccatcgctggaagtttgatccacgagcccgtccaagacgtagtaggctaacagggtgcgttgctggatctcccgcgcagcccagattcgccactggtgttctttttctgcagcgggagcatccatcgagggcaagttgtccattgagtatggctcgctgtcgtacatcccgcagtgtcttgcccataagaagcccagtggatggaatacttggctggtggttctaattgcccggttcttggatagcgccccatagatctgacccagtagtgctgtgatcatcaactgaactcccttgcaggcatcatagggtccattgtgtgtgatcagagactgccatgaagttgaaattgcggtatgtgctaggtgccatagggcttcgccttttaaaaccgagtccttggggcctaggtacaaagagccaatggcgatggcattaaggaggagagcatgcgtgcattctcggaaaacaaaagttgcacgatgcaatattgggaatgtgggaatgaagcgggcgaagaacatgtggagacactcgtcgaggaagaccgaggtgatggacatggatttgacggcggccgtaacactcgatgactagggaaataaagtgtcagtttcgatcaaatctcggtgcaatatgtcttatgatcaaagttttcaacagccctagtttgctcatccagcaaaatacaacgctcaactcaccgagctcgtgaccatctctgtgacatctcgcactgcttgatgccctccaccggacagtatcgccccaacagaagacctacggtcatcgaatgaattcggggacccaaaatccatgccattcatatcctgcacgacaggtggaaaaggcaaggtatcaagcggaatctgccaatctgtcgtatccgaggacattaagctctgaaacaagttttccgaatcaggccaaaccaacgcaaagtccaactccgagtcgacattatgcatactcgcatgatcgccggagtgggactcctccaaggaatgacttgttgctgaagttgacaccggatcaacagtggaagcactcctcgtgtcccaagaagggagagaattgaaagaggtaggctgcggcggtaagtgggcctccgaatagtcattctttgcatttatagcacgaacgtgcagcttctcatgccgagtaagagcatcttgtcgggcaaagggccttcggcactctttacagatgtatggtttagatcccgtgtctaagttttccggttagctgggcattgctttttgagctttctgtggggatcataaattattgggagccctgatgaaattggaacatacggcagcgctcatgtctctataaagacccattagttagctcgtatcacttggcggtccctccttcgtggggaagtttgagttggagccaacgttggaagtctactcaccctcaagtgttcggccttggagaatgctttttgacatactcgacaaactagtttcttgcctcctggcagtgcaggcggcgccgtcattatccctattgacgccatttttgttcgataaagagaaggggcagtaggagagtaaattgtggagaggtgattgtggggtgtggcactgcttatgcgatcacggaatttcattttgcctgcaaccccaaatagatagtcaagttgaaatatatagatactctagttacatgaatgttgatctaaaatcaagcaaatgaagaaagtcaactacctcattttgcaaaccttcgtgatttagaagaacctgtgctcccagactgagttcttatgttgtaaaataatgccatagttgagcgtccaagccttcaaacttttattacgccaatagacttattgctacgcttcgctccgcagttgtactaactattctttctcttgcttcagctagttcggtgagaaaatatcatacctaagtatcctttgtatggttaagtcatacaaaagatacctagcttctagatcttgggtctatgtttatggtgttgcttggcagggctgtcccttgtaagcgttcaagcgttcaagcggaaacatcggtcgtggcaatacgaccaaggaagcgtggctactatgttccttctccccctatttctctagactgcatcagatcggcaataatgctcagaccaagttgcatatgtgtctcgcgtcccgcggctggcaagcagcattgaaaatgccgtcgcgattggggtttccccagctgaacggtgaatctagcgaaataaattgctaaaccctaggaaaattgcgccaaggcgtcgaaatctagagcttcggtacttggctcgggatgaaaaagtcgaactgcatagtaaaaagcttcatcggctagccgtgttcaagtgccatggcgatgctatatagaagaccccatgacagcaatttctttagcggccttctaactcgccggtaccgaggctttccaatcaggaaccgtggagtgcctccgcatttctcgccattttctccccattttctcccccgaggacccgcaatggagccgaaaaccccggagaataactaccccaggcgcaggagagctccgactgggcaaacgcggtgggattagtgtcttggctatgcacactcactctgacatttctcagaagccttcagatctgtggttattagtgtttgccccggtgccctcaagtggctcaccctgagccatagtttttcctgtaatcctcttatttaatacccccactccctttgactattctcacgacaatcgacacatcgcctggtactgagaccacctttttaatcgggggaacgcgagcagaatgccgtcctttgagttgcaaccgagctcgtctcgacgagacgagctcgaggaggtgccaggcacgaaagcggacatcgatctcatcgagagcgcaggaaatggacacgcagtcacttccgtcgagtcaatggttgctcgtctgccaaaagcacaccgcgactatctgatggagcgacacgggactttggaactcgatcctattcccggaatgagtccagctgacccttacaactggcctgagtggaaggtaagtcaatattctccctgttacaaaatcttgaaacgggacaaaagcaaatgatcccgtcggacagaatactgatatgtcaacgcgcagaaaatgaccaaccttgtcctcgtggcgttccacgcctgcatgggcacatttaccgccgccggcattatccctgcctttttagatatctccacagaactcggcgtcggaatgcaagatgctagttacttgacctctttgcaaattgccatccttggaggtgcgcctctattctggaagccgctgtccaacaggtatgggcgccggccaatcttcctcctctctctcatctgcagtcttgtgtgtaatatcggctgtgccaagagcaccacatatgcctctctggctgcttgccgggccctcgtggcatttttcatctcgcctgcctccgccattggcagtgcggtcgtgatggagacaacattcaagaaagaccgtggccgttacatgggtgtttggacactgctggtcaccctgggtgtccccgttgggcctttcattttcggcttcgtcacctatcgcgttggttatcactggatcttctggatcctcgcaattgtaagttcacattcccacggtagtcaatactctattcatgggctgatacatctaaagatcaacggctgccagttcatcttgtatctgttccttggccctgaaactcgttatctgggcggcggcatcgacagcaaggagtcaacgatgaagatcgagtacatgtcactgcgacggatcgaccccacaccattctcatggttcgagttcatccgtccactgaccatggcccgacacccatcaatccttatcccagcgtgcgcatacgcaatggttttcctcttcggcaacattcttgcaaccgtcgagattccccaactcctgcaagagaagttcgaactcaacgccgaacagcttggcatgcagttcctaggcgcaattataggatccgtaatcggcgagcaaatgggcggcgtgctgtcagacttctggatgagccggcgcagccgacgcatcaaccgcaaggccgagccggaattccgtctgtggctcagctacttcggtttcgcgctcaccataatcggcatcatcgtcttcctggtctgcacgcaggagtcacccagcggacactggaacgtaacgcccattattggcaccgctattggtgctgtcgggaaccagctggtcaccacggtaatgatcacctatgctatcgattgcttcccacaggaagctggtaacattggtgtgttcatcacgtttgtccggcagatttggggcttccttggtcctttctggtatgttttctttctctctgcgtttattttgcaagttcgtcgctaacctcagctcaggtttgctcccatgttcgagactgtcggtatcgctcccagcgcgggaattggatctgcgctggttgtctgtgtcagtgtcattcccaccatcttcttgcaatggcggggtaaggattggcgtagcgaggagtaaaggcactgggatggaaattgacttcggtttcggtatttgacgttcacaattttcgatattattgtctcgggttgggttttgtagagtgtatcagtgggtatgatatagagtgatagagtgatcgggttcgggttcgggttagatgagtcggcatcgaacacggcaacgtggttctagattgcatataggtagctaggccaatgaatgattgtatgattcttcaaagagctttggcaatgggcgagagaaaatacacttggttagtacataacagcagcatcaaaaagacaagttgagttctgctcaagaaatcacatcgccatctgtagggatctgtagggatgtgtatagaggcataaaaattcgatatcacctggaacagcaacactcctataaagaaaggagtaaaaattaaagagaaggattttaagtcaacaatagagatctagcaaaaactcctttgagaaaaatgagccggagactatctcttaaggaccactccgggcgggaacagctcgggacaccgacccgatataattccgtagcgcgggtcaacgaggcccacgggcggccctggcagacaattgacaactgccgggtgaagagtttcttgcagccctgcttaaatgttaccagcatgcaccataaatgaaggagtgagatgttattcctatacagttctactatggggtttatgctatacaatcaaacatactagtatgatagttacatttgatcagtaaaaggccaagcatcaaatccaaggttttgcctttttctagacactttagcgagcttttgtctacaacacagttgtccgaagttatacagggcgatgtgtgggagagacttactccgggtaaggaaaaattcatttccggttgggttctgtgattggtcaaagcttcgcgatatagctgttgactcgcgtttttgcagaatcccttaccttgtggtttggagccaggatttgaatatatctatgttgtagttcgttggattggatggtcattattagtggccgcctttattgcgccgtatatagggaactttggatggttgtgcaggcaatcatcccgcatagagtttacgtgactacagcatgtatatgatttcacagttgccagagctgctcaaagtcattgactatatacaattggaaagtattgtttcagaaagtcaaatctatcgttttatattctggaatcatcattgatgctcaatcttattgataagtgtcccaatgtgaggcagcaactcaacggcaaactcgtcgccagccttgaaaaattccttcggattcctagctgctccgacaccgggcggagtgccggtcaatatgattgtgccggcaggcagggtggtgccttgggagaggaagctgattagttgagggacgctgaagatgaggtcactgcgatgaaattcaatgttagttgatgttactttgtatactagaagcaatgggaagcaaatataacgtacgtcaaggggcagttctgcattatgttgccgttcttgagaccgcgaatctgaagcttgctggcatcagggacgagagcagcggaaacgaggacggggcctatatataccaagtcagtgtaaaattctcctggatattatacagtccatgaacaaaccaatcgggcatgcgccatcaaagccctttgaaaaagaccactggctctgactcatctgagaggtgcgactagaaacatcgttcgcagctgtgtagccaagaacgtagtcgagggcctcagactcgggcacatccttagcgtcacggccaatgacaataaccatctcagactcgtagtcgcctgtgttatcttgctgtgtaatcttgggcagaactgttggtgcaggccaagggtcagccagagagctggccggcttcatgaacaatgtcgggacttcggggattgggagacccatctccctggcgtgggaagcatactatagtgcgcattagtaacttcatttctcttgaatgttcctttcatgattaaaacccacgttcaagccgatacagcgaatagttccaacctcgctttgcgccaagggggacagaatccgcgcgatggtctccgtcgcatcagtcacctggccagggctcaggactgaagtaccggagaacgggcgcaccgaaacctcctttccctggtagagagccaatccaacatccaacttaggatcgacgggctctccgattagaaccttggtggggtttgacttagggacaaagcgcaccaagcctatttgccgtcagtctggatatccgggtcaatttgagagatttcttacgcgaaaacgtagatgcgattttggacatgattgtattatttggagaatcaaaagaggatacaagtgaattgaagcagaaaccccatatataataagagctgtcgcgaccgatagcggagtatgtctaccccggcactgtataagccggaggggcagcttcccacaatgtggggaagtggcgagcgcggccgatttcagcttggagaataaaaagaacaaaatccccgcgatggtcatggttgtgtagtcattattcctatccgtatcccaccgtcatgtctgctcctaaaggtcccttccacctggttagtgtcaacaccgctcctgagcgcgccagacgcctcatcggccgcgtcgccgaggctctgagcgatcggtacactatcatccacgtcgacaactgcgagagtaagcatattgagcgtcattattgagtgtgaatctcggttgacagagtctcgcgcaggaatcgacgaggtcgaggccaaggtcaagcagcacaacccggaggttctggtaagtccgaacttcgggatttccgaacattcccaagctagaatttcaaattaacgccctgaacagttcagtgcctctatgtggaccgctgaggaggctgcgcagatccaccaaattgctcggtctgttcgacccgatatcaagctgcatgccattcccgagggcttgcaggtcgagcgtggccctgatgccattgttgaatatctgcttgagaaggtgccggtgctgctggacagctaaacattgtaaatatatatgaccatgatatatccgtgtctcaataaacgttcgatgactagtatttattacgttgctctcagttaagtccacggtatggaaactttgccttccttgtgatatctccgcaggcaccatagtatgttcttccgagccgcaaagtaaccgcattaaacgcattttatgctgatgaaacagagaggacagaaagccatacaaggcttaaccttcgttttgtagattattggaactttcgatagcctggcaaatccgacttcagaaatgagtcagtcgacgagaaaataagggtcccatgactacactaactctgagtgactttaactacatgcgaaccaccgacaagcaacctctcggtgtttaaatatttcgggaaattgaaccagcaagaatatgcacagcctgatacagcattctatagtggcatctcgtacggcgcccttgaccacccttggcaatgccacacaccgagatatatctgtgcaatgatccagagctgagtggttcctgcccatcgattggctccagtctaccaaaaattcggaaaccagaagcaaccgtctctcgctgagatttgtggatccatcgagcgaaactggacgagtaatccacggaccacagcccccaagccctcaatacggcacctgctcaatacgacaattctgctcaaaaatggtccctcaatgacttcctatccaatagttattcggtgaacacgagctccatcccgctccaaccccttggcaccttggcattcagggtcagccaggtataactcccgggttatcacttcactaggcacaaaacgaatcattttcacggtcaaagcccgtgcttataagctcatgctcgaccggggcattttctagttctctgttttcttctttttgatgaaaatctagaatgatgagctgacagacgattctatctcaatattctataagctgattcacgagttcgagagcaatgttacttcgtcgccattttctcacaatcctggccttactagccgtcccaacgcgggtattatcacgaaagggcggtgatggctctagcagtgatggcgatagtggtagctccagcggctccagcggctccagtgatagcgatgacacctcttcgtcaacaccatcctcaggcggactcaactgctttgatacccaccgccttgactttgacgatcttcaaccttcgcactacgaccgatacaatcgggaaccacgccgtggtcatgctagtgcttacagcgattgggatggcgtcttcttcaaaggctcagccagtttcaaatacacaatccaaacaccacctaacaatttgacagaaggcgacatcgttagttcatctttcatcacatgtcccgttggcacacaatccatgcgcatgctaggcgctgcatgggtcgctgccaaagctcccactcccgctggacctctcaatcccatcacgttggggttcaaggcctggaagagcaacgtgcgcgtctcagatatcgattattcatacagtgtctgcgaagacttggatctcatgcgcctcactacgacggtggactggtacaatgaaacttcagtcgagaaggccatggatgcagttacgttaaacgtaacacaggcggctgataacatcaacaagatcctgttcgacggggtctatgatcttaaggactgggcagatagtgaaaggagctccatggaaccagcacgctatgacaacgccggtctttcggatcagatgatttcccttccggatagtctatgctccgagtacagcaatttgggtaaaatcctcattggatggcccactgggacacacatcaatgggtctatgaccaatgaaactcttgagttgggtttttctggctcgacaattgctgggttttcacatcggtatccatggccggacaccgacacgaaagtaaatgtgactttcgaatttacatttgcgggtagttatgatgctgcgaattcatctcaggtggttctccccggggcgtcgagccacaatgcgtcactaatcacctttgagagggcgactggtagtgccactgccacaagtctctcattgtactccgtactactgtctttattggtcagtgttggggtgatatttgtgtgagcatacaactctgggaggaaatatatcaagttatcgccaatatcaattgatattttcccttctacttccttttcgttgtcatgaagaaactcaataacaagaaaattcatttttaagtaatcctccacctttgctagcatctcaatagcccggcatcactaggacacatacctaaatattaaaccgaataagtcgcaaatggcagtaattcgtcactccatacttagtaaccatttttgtctgggacgattccatagcaaggaccattcttgctaaacatggcccgcaagtcatggacaataaattcaggaacctcccaggcagcaaagtgacctccacgaggatgctcgttctgttgaacaaccggacctaggccagtggcccaagagcaagggatgacagaaatttcacgaggaagatgtgcaattgccagcttcactcgcgggacgtatgcaatcaagtccttgtaggatgttcccttgaccacctcggcgtgaaaagcttcatagtatatgcggacactagcggcgggtccggccgtagaaaaccaatagatagatatccatgttagaatctcgtcgtcggtccaggcatatgagtctgtccagtcgtgcagcttctcgtaaatccaggctaacaaggcaacagggctgtctgctagtgctgtgccaatggtctgtggcttggtgctttggagttggttgtaaccgaagccttctcgattaaaccactcagtcctttcgcgacctgccttttctcggccattgtacggcagcaatgcgtgttgcagggctgtccatgggttattgatgaatttagggggcttagccagcaccatgtttatatgagaggctcggcagtgctcggggtatagtagaccgatggttctagtaatccagaatccccaatctcctccctgggtcactgtgcatagtggagttagttcagggctacattttagttcttttcgagccataccatactgatcatagcccagcttgatcatgagcttgtgtaagacttcggcatattgtgcaaggccaaagccacgttgagtcactcctgaagagaagccgaaattaggcagcgatggagccacaacgtggaatgcaggactgtggtcgtcgcctttcagcatcggtagcagtttagtgacttcaatgaacgatcccggccctatttagaaattagacaccgcacgctataggaaatttatggattcgattaatgagaataccgatactcacatccatggctaaagagcagtggaattgcgttctttttggtattgatttggtggacatctacatgttgaaccgcgtgaatctcggacactgaggaatccgtattgcgtaaaactcacagtggatatccaaactggcaaacccatctacctcgatcgacgttcgatattggggcagttcatttaacttggcttctgccttccgccagtcaaagccatccttccagtactctatgagtcgctgcacttctttcacgggagttccaaaatcccaagaatcttgttcggcggactccagctgagttgcgaatttggtaagtgctaggcgttggtgaaggtcttggagattctcatcaggaatggaagtattgtacagtcttggttggtcggccataacggattagtttggtttaattagatgataactagaagctatctggtgaggcagtgttgcgggggagactttgcgcttgagatgaagtcagtctctccgaggcccgggggcttcaccgccgggtatcccagaggccacaacgcctaacctagcggagtacggagtaccgggacaatgtttactcactagtgctctgttgctgttcgatattatgctacgtcacggtcttgaacccttaaatcaaatcatctaccatttattgaccacattaccctaataaactgacctatgaacaaccttagaaatcgtaagaaattttgcaataaataaatgtcctgagttaggagggtggacggccttggggggttggggggatgggggggnnnnnnnnnnnnnnnnnnnnnnnnnnnnnnnnnnnnnnnnnnnnnnnnnnnnnnnnnnnnnnnnnnnnnnnnnnnnnnnnnnnnnnnnnnnnnnnnnnnnnnnnnnnnnnnnnnnnnnnnnnnnnnnnnnnnnnnnnnnnnnnnnnnnnnnnnnnnnnnnnnnnnnnnnnnnnnnnnnnnnnnnnnnnnnnnnnnnnnnnnnnnnnnnnnnnnnnnnnnnnnnnnnnnnnnnnnnnnnnnnnnnnnnnnnnnnnnnnnnnnnnnnnnnnnnnnnnnnnnnnnnnnnnnnnnnnnnnnnnnnnnnnnnnnnnnnnnnnnnnnnnnnccggggccttccaacgttggggcccccgaggccatgaaagtagattagtcagcaagaagctggcccgcaggcccgggcggtatttccaaggtttccaatcattgatcgcttgatacttgccattctctcaacctgaaatcggaacatgttctctctccggactgttgcacgcggtgctccaggtatccgggctttctccacagcccggatactgcagaccaagctggcatatcaggtctttggtccggaaaaaggcgaagctgtccgggaccctatcctgtttctacacggtttatttgggtcaaaacagaacaaccggagtattagcaagtatgtttcgggaccagatatataatcaaacttccttttcttacatatcttttaggattttggcacgggatctgaaatgccagatcttcgcactggtgagtttccgctcgtccccggaaagacatgaacaaaacgtcattttagaatcctaaacaaatctgtacaggatctacgtaaccatggccattctttccatgcccacgagcagaattacggcgtcatggcggaggatgtacaggaattcatcaaacagcacaaactggacaaatgtgtcctgatcgggcattccatgtatgtgatcatactccatgtcagccgtagctcaagtgctcttcacatactaacaattggcaaaggggtgccaaagtggcaatggcggtagcattgcgcgcccccgaatacgtgtcagctttaatccccgttgacaacgcaccggtgaatgcagcactgcagagcgatttccacaaatatatccgcggcatgcagaaaatcgaagatgagaaggtgtcaacgcaatccgatgctaacaaaattctcgagcattatgagaaggtaaggggtggtcatcttttcaactagaggagaaggcgtggcaatgagcctggtacccttcggtaatttttagcatgctaacactacccagtctcttccaattcgccaattccttctcaccaacttgatacgctctgaagataacacactgaagtcccgagtgccgctatccatcatcggcggtgcattaaataatatggctgattttcctttcaaggaatccgataacctccattattatggcccgacgctctttgttcgtggcactaggtctaagtatgtttcggacgacaccgtgccggctatcaaaaagtttttccccaacgcgcagattgtggacgtcgaagcgggtcactggctcatttctgagaaaccggaagaatttcgccaaggtaattccctattgtcaataattaataatagtttatggcttacacgatgataatagcggtcgtgaagtttttgaagtcgatataattgggacggcattattggggtgggatatcggtcacgtgacttagaatttagacgcatatgtactagagaactccattgtacagtaataattcactcattggtgtgctgagtaatatcgatttgaatagaagatcgcccggctttgagcctatcgaccgtgtggcgaagacgtatctaataatgcttcctcttaaagctggattgcatagatatcgatggttcacgtgggaagtcgtaattcgagagtgacggagggggaagaacgagcccacggcgatagttgtgagaacataatatctaggagatcaggtttggacctgctcattcatcctgcttattccgctttcgcttcttgcctggtctgcttgaagaataaaacagatcttctgcctgctccgccctcttctttgccctcttcttgtcttttctgttggagcccgaagcaaaatatgacggaccagaagagctaggagccggcgaatagtcaattaccgaagagcattcggttgtgtttctttcgtcatcggagtctattacagaggagacccgtcgcttccctttcaaatgttgaacctgacggggttcggcggatttgccaggatacggcgacggatgaccggagctgggtccactgggcgtttgtgagcgctgtcgagcctgcatcgcagtgtgatttgacttcgaaccgcttggtgggcaattttcggccggacccttcccgttgacctgcactggctgatatgaacctagagcagggcccatggggactgtcttgggggttgtggtaagtcttggaataaaagcacggccgtttggttgtgattgaggagtttcctgtccatcgatgcgctcctccattggtctatcaagaatatcggaaatctttgctccccctgcaagcgccttgaaagtatcttcagctttcctcagacgtttgatgtacatcttcacctcatccccctgctcagtgaatttctccaaagataccggaggctcccgctcttcaagggctttcaccttttcccggagtttgccgaaatcgttctcttcggttgcgttatgaccttccaactctttgagctttgtcctgagtaccccaagatccgctttctccgctgtgcttcgggcttccaagtctttcatctgtttccgaagttcgttgagaacttcatcttcggttttgttccgaccttccaggctttctagcctcatcgagatattgccaagaccatttttcgtggtagcgtctctctcctcggcggcttttcttaactcggcgatcgctttttggacggattcgagtgccgagaaatgagcatcaatcttaccgatgaatggatcgatctttcttatggactgattgatgttgtcaaattgtgcagactgctcagaggccgtttgatccatgcctccgatggtgtcgtcttgggcggagatcctgttggataaatcactccattgatgaagatttctctgaaactcatcactgtgctccttgattgctttctcaatcggtgcaatcttgtcggaaaggcctttaacctcttggagcaaagtcggcaaccgagtcaaggtctggagctgctcggatgacacatgtgctgcttgagaccttgctgcgcaggcctgggcatttcctgtatctgccttgaatcgattcgtatctgccttgaacgtctctgtatctctctggagcgcagaaattctgccgtcaatttcagtctggtaggccgtcaattgatgactgagtttatcaacagaggggtacatttgctgcatggcatgtgccatagaattgactaagtcaccagtagtaatgttggaccaccgtgtttctaatgaccgaatgcccctagagagagattcaattttactttcgcactttgttacagcccgaggaaggtcggagactggagtaaggcgggtttcaaatgcatctagtccgtttttgaggtcgttttggaggcgctgcaagctctcaggcaaactcgtcctaagttggtgaaggcccacggcgaatattttttgattggtgttcatttccttggagtttgcggtcaggtcctgcacctttctcaaaatttcatgctgtttggtttccagtgatttctggctcgactcttggtttctgcgtaaagcgctcaactcatccagacgggcgacatccacctcatgatggaggtccttaatcttgttgagaaaagttgtgtactcctgtactcttctttccagggacaccattcttgtaagcaccccgctgtggggagttggtgttgcttctgacgagggcccaccgccgttatcgatgttctgttgctgggttctgagtgaggccaggtgatcttcttgagcggttatttgcgccgtggtctcctgcctttgggtttccaggtcagtttcaatttgtgagatttgagtcgacgcgctattgttgagatcatgtcgtttattattgagcgacctgagattgctttcaatgtcacgaagcttgccctcagcgtgttcattcgcagtttttaatttgccgccaagatccgagatattggtctccagcttctggttggaatttctcaattcttcctcgacggtgtcaaccatcttctcgacggtggagatcttgtcatcaaacttcttgtcggcagccttcacttcatcctcaagttctgagattttattcgtgaattgaccattgcgtttcatttgatgggagactgagttcgcaatcctattcatgtatcccattacctcgtccaatccattcgggttctctagggaatgctgcactttgtccaggtttcttttgagttcatcgatatcttggccctggcttcgcatgtgcgtctggactctgtcgaattcggcatttcctttcattggattatcgccgctgctggttgggcctaggccttccctcatttccttgattgtggactccagattcccgaccctttcaggtatcttttcaagctgggattgaggcttgtactgcgacaacgtcgaattgaaattatcctgcgcctgattggagagtaatcgatgctgcatgatcgatttgacgtggatgtccaattcatttttggccgcgtccagctgctgctggaagagagcgatgacgctcggaaattgttgagattgttttgccctctgtaggtttttggtgatagaaactatctcattttggagtttctctttctcttcctcgcacttgttcactttgatcaatgagttgaccaaatcagagatgaacaatgcaccttgacgaatgggcgcacttgggctttctattgacgtaggtcccgcggcgctgttaggaatcgagagtggagacacctgtgggagcgatttcgcaggggatttctggatgagggcgggtgttgcggggaggtttaggtgtgcctgttgagcagttgacgattgggaatcaactgattgcctaacagcaccggcaagccgaggatcttgcgccttggtcggggatgacccaagcagaagtaggcccgagagtcgcttgcggggattgaggttcggagagtcaacatccattctgctggccatattccctgcaatgaatgtattgcaaaatactcatcgtattcgcaggagaactaaagtatagtgtttcggcggtcgacttgtgagacgaagtctacacggcagtcctaaaatggaacgcttaaggtgcaatattaacgcgtccactgtatgaagacttggatgtgaggtattgttaaaaacgcccagtatattcctcctgaggtagtcaagggaactagatatgtctcatagaacgtgttataagcaccaaatttgtagaattcaagccatgccaataaaacaaagcagaaatgaggtcaagcgggttcaccattcctttcaggaattattctgccgggcggtgacaatataattcggtctgcgatctgccctctcttcttttgctttgctagagctttggcgcatttaccaacataatcttccagtttagaataaatttcactctggaaatcttcaaatatggctgtggtgagttacaattcttctgtaataacctcacggttgctgacaccaaaacagccaatctcgactgtcgcagagagcaaggagctccggggactgaacctcatcgccgcccattcgcatatcagaggccttggtgtcgatgcagacactcttcaacctcgggcatcatcccaaggccttgtgggtcaggaaaaggcccggaaggctgctgcggtgattctgcagatggtgagggaaggcaagattgccggtcgcgctgttctgatcgcaggacctcctagcaccggaaagacagcaattgcaatgggcatggcacaatctctcgggccggacgtacctttcaccatgcttgctgcttctgaaatcttctcaatggagatgtcgaagacagaagccctgacccaggcattccggaggtccatcggtgtgcgcattaaggaagagagcgaaatcattgaaggtgaagttgtggagattcaaattgaccggagtgttactggcgtgagtggattctctatgcaaacgagttcataacattggatactgactacctacagggcaataaacaaggaaagctcacgatcaagactacggacatggaaacgatttacgacatgggaaccaagatgattgattctatgacaaaggaacgagtaatggcaggagatgtaatctcgatcgacaagtcctcaggcaagatcaccaagctcggtcgctcatacgcacgctctcgagactacgacgccatgggcgccgataccaagtttgtccaatgccccgaaggcgaactccaggttcgcaaggagatcgtccacaccgtcagcctccacgagatcgacgtcattaactcgcgttcacaaggcttcctggctctcttctccggcgatacgggcgagattcggagtgaagttcgggaccagatcaataccaaggtggctgaatggaaggaagagggtaaggcagagattattcctggtgttctgttcattgacgaggttcacatgcttgatatcgagtgttactcctacatcaatcgtgcccttgaggctgagttggcccctatcgtcatcatggctagcaatcgcggccaggcacgcatccgcggaaccacctatacctctcctcacggtctaccccttgacttcctcgatcgggttgttatcgtcagcacacatatgtactctggtgacgagatccgtcaaatcctcgccatccgagcgcaggaagaagagattgatctttcgcctgatgctctcgcccttctcaccaagattggtcaggagtcaaatctgcgttatgccagcaacattattactacttcgcatctcttgagtcaaaaacgcaaggcgaaggaggtcagtgttgatgacgtccaacgcagcttccggttgttctacgaccctgctcggagtgtgaagttcgtcaatcaatatgagcagcgcttcatcggtgaccaaggtaccgttagcttcactgctgctaccaatggcgacgccatggagctttcttaattgggttacgtgttttagtactgggctattcggtgggcagttaagcgggtcgaaaaaactacactggatcttgatttttatttcgttgtcgcatcaaacgatgtatgataggactggcgcttgctgtgtttatttggcctttgagattcaattgcagtcctctgttctgggggatctgatattaatatttcattcataaatggtattttgtgtatccaaggcaatgtcgtagctgatatggggggattatattacaagaaactgacagtgccgctccactgccctacatctccaacttgacggaactcaacaccttcgccaaagtagcccgcattcttccatgagtccatcatcgcgctatcgtacggcccatgggcatcccctccatctcgagcatcagaccatcgatattcccacatggccggaccttgctcagtcattccttccgcaggagggtcgatccagtcctcacccgtgtcgttgcggtactgccgtgtgagcatttcgcgctctgtgtcatagatatctatttgaccgcggcccattaagatatcggcggcgccagtgatagaatcaattgctttcttccgagccagctcattggggttctcatccgtcatctcgacatcctcgacggcgttcttcttcttattctttttgttttgccacttgggctttcggtgaagccctttgcccagtcgggccagtgcctcgagtgtcgtttcgccgcgttcgaggtgagtgatgatcgtcttcagggcatccgctgtcaaaacgctgtcgtccattctgtctttctctttgcgctctgcatcgcgttgctcggcagcttctttggctttcttgatgtccttcttagaaacaccctccagccacgagtcgtaggccgcatcggggtctactgctttgcggacgtagttgccttggtcgtcaaatcggccctcctcttgttctgttcgcatgttgaaggcatctaggagaggtgcgtgttttttcttcccacccgcaccaagttcctcgtccaccacttcgtcaattcgtgcgcgttcctcttccccgacttcactatcactcccatcttcctcctcatcaatttcggctgcacccttgctcagatcgacatgaagtgctcctccaccttttgaagaagcgacttggccctcgatctcgtcgtctcgtaggaaacgaacggattttttcttgtttatgatctcgtcgccgtcgacttcctcttcgccgaagtcctcttgtagctcggcgaacatatcatcatcttccgcatcttccttggcttgtttgcgtatgggtttctcttctctgcgcgcagaaaacccctcgttctcgctgtcggaatcataaccctcgagattgaccgccttgcgtcttattctttggccacgtctgccaatctcatcagcgtccagtactgcgtcttcttcgggcgcatcagctgcaagagctgagggattgcgaaggtcgaagcggggcttcttgtgctctgaggaatcctcgccgtcgtcattgtagtgggtattggcgaaatcttcgcctgcgcgcttggggcgtggcaatgaactggacatggcgcttttggggcgatttcggttgaaaacaaacgagaaagatagcaaattggaagggtaaatcacctctaagagagctgatttccttgtccggggtcggaccggaaaatcatggcggagcgagctgcgtcaccgatggcgatccaaagagcggcatattgtacctcaaatcaacccgtctcacacttttctctttgtccatcttcagtctttaaaaccacattaatttgacatggtgagtcaactcagactcccccgatcttcaccttactaactaacagctttagtaccgacctggttactggtcggatgaccccatggatggaatcctaggtgccggtatggcgcgcccgggcgccacgtcccgtcgcttcgatgaatactatcgctgctacccagtggcgatgcttcctggtcctgaaagagagaatgtgaaccacggtggcaaggtcatcatgcctcccagcgcattggacaagcttacccgacttcacattacttatccgatgttattcgagcttcataatggtgcgaaagagaggatgacgcatgcaggtgtccttgagtttattgctgaagagggaaaaatatatttgccattctgggtgagtaagacagactcgtcaacgtgttgtaactgtactaagactcggttcgctacagctgatgcaaacattactactggaacctggcgatcttcttcaaatcaaatcgacagacctccctcctggccagttcatcaaactccaagcacagtcgacctccttcctcgatattagtgacccgaaagctgtgctagaaaacgcctttcggaatttctcatgcctttccaaaggcgacgtcttcactttttcatacaatgatcaagtatatgagatggcagtgctggagacaaaaccttctgggactaagaatgctgtgtccgttctagagaccgacttggaggttgatttcgccgctccggttggattcgaagaaccacagcgaactagcgggaccagcacacccggtagcgtcattagcggtgggaagcttccagctggtggacttttacacccccatggcaccatggcacaatcaatcaactactccgccattgcccccgaggccacctctgctgccacaggtgcccgtgcggcatcatccaactttttgtctggaggacagcgcctgaacgctaaaaagggcagcaaggctccgacccctaacccttctactcctactccaggtgcttcaagttcctcacatccgcttccaacccgaagaatcaacggcccgcaaccacttcgactcccgcccaatcaactcttcttcgggtatgcaatcaaacccgtcaaaccccgtgatgagaatggtttggttgtcccagatgaccagcctaagttccaaggaattggaaaaactttgcgtgggaagcgaaaggatctgtccgactctgccaccccctcggggagtgaaactgagggccaaaagagcaaggaaaacactaaaaagtccgacggtgggggtcgaactttgggaaagcactaatgtctgcaacaacctatttaaacctacactttcacgattcccctgggcttttagatagtggaagtctctagattccgcagcgagatttccttcaagggcatagcaaggttcaacatggcgttgggggagtttttttaccttcacttgaatacacaaaaggccttgcaataaaccccactattttcatatttctcgtaggcagtccccttctccgctttctggtctttgttttacaatcagtggtattcatatgtagcggatatcgaggactcttacaacactcaagggttgggatgcttcggaacgatcaagcatgcctcctatatatctctgcatgtgaattgaactgcaggtaagttatggtcctggtcagaaacggcacgtttagttcggctagcgcgcatagctcttggcaagccgaggatcgccgtgcacaggcctgaaactggaccacactattgatctcacaccagatattgggggttgcatcatggccacaatacctgaaaccaatttgggggcattcatcagactagccccgtcagtctatctccaagacccgcccaacccgagcgagaaggcggataggccagtgatattcattgctttttggatgaatgcacccccgcgcgctttagcaaagtatgtggtcgagtacagagggctagtaccatcagcgcgaattatcttcgtcagaagctcatcaagtgacttcatctggcgtctaagggcccagacccggagagcccgcgtcaccccagccgtggaagcaatgcgcggtctagtgacacctgagaatccagtatttgtgcacttgttctcaaatgggggcatgtcgagcacaacacacctattgcaagcctggaagaatgcgacagggaccccattgcccatatcggcaatgatccttgatagcgcaccgggcagtccgagcctacgagcaggactcaaggctttctcctttgcgcttccgcagatgtggatcttgcgactgcttggcaaaggctttatttttgctttcttggttctcttcaagttgatccattcgttttctatgtttccggatcctatatcccttgcccgggagctcatcaatgatacctctttggtacgagcggctaactcggacggaactctcagtcgttgctatatatactcagatacggatgatttagtggactggcgcgatgtggaatcccatgcggtaaatgccgaggctgagggttgggtggtgcgccgtgaagtgttcaagaactcccctcatgttggacatatgagaactgagcctgatcggtattggggcattgttcgagagtacttgggagctttggtgtcggtgtgatgagcattcctttgcctttcggttttgctttggcttaaggaagactggaacgttacatgatagacacggtactgtgcgacaaatatacacatctgcttgcctccatgcataactgttttttttttctccttcaccaagtcttctgccaatgaatatatatccagggatttccttccaaacctttgaatgtcaattgacttctgatttaaccatgcagcaaagtttcgcaattccatggtcattggggttaaatcactatgactgatatctaaacatcatccaggcagatttgttagagccaacgtgctgaaaggcccggagccaatttccgcaacttccgtctcaaggacaccaaccattgcaatataccccagaatcaaagacgacgacagccatgcatcattatttcggccctcgttccactgctcccggcttgatctgttcaagtattttcccatctcaatcatcttatttcacttatcttggtgcttgtctgatattgtgcaggccatttcacaatagacctcgttaaactgggttttggtttccttcgttggccctgtcttactctgaccgagcaaaataggtcatctcattatcatatcaatcttggagacttttatttggtatattattattgactaaacgccacgatgttccaacaccaatcccaccagccgagctacctcaacaccatggcggagaaagacacccgtttcgctcttccgggattcaacaggccgctagactttgctccgacggagaaaaacatctatggtatcgagagtcggagtatgtttccatctgcgctggatgatagagatatccaagcaggatacgtggagtaagtgtagaatccccaagacccgagaggggctcaatgctgaaacccatcatcatagcctacccgtcttgaccctccgcgagatgcatatggtagagttcatggagcaactgaccgatattcatgagtggtggaaaaaggttagtcgttctcaatacaaccgatactgatgatttcgctgaaatggttttagatctttgatcccgccacacaagaggagtggaagaaggcggccttaaacagtggcaaagaccttacgctcaacatggttgaatggattattgacgagcttcaattcaaagccatgatctacgagaccacagatgtagtcgccctttacaacggcgatgtcaccaagtccgacacaaatctgcctgattcactctatagtgaaatgcaatcccagttcgaggtcctagagtacgatttggaagaaatgaagtactaccatccaggacatctaagccaacagcgtgacctcatttccatggcattgtatccgctcatttacggcagctcccgtattcttaccgacagggttattggggtcgaggactgcctcaagtttgccggcaagggtgaagtgatcccaattccaaaagataccggaataactagagaagatattgcctggcgcgtcttggcccgggcagacatcaaggttcggccctacagccggaaataccagcttctcccttcagactggtcactcggtgatgatggacaatggcacatagccacatacatcaacaatctgcatccaataaaacaccggggcctctacaatctcttcgagcggattttcaattgtctcgttccgcagtggaacgcaactttgactcccctcaaggacatgctccattcccgtgcccgaatggagtaccacaaggcggaatattacccagtcccagcggaaatagctgcccaggcacctacgattcaaccaaaagaggcgcagagtgagtttgacgagcgcatggagaagtggagaatgcagaactgccgtgccatccaacccgacgcaggcaagttcattccctgggcagtaccaccctggttgatggacaaattgcccgaggacctgcccagtcccgttcggattgaacgcggtgtcgatatcaaccgggactacaaggaccatggactgcaggtgatcacacgtgtgttgggcattgatctaactccggagaatccgactttcaagacagactggcacgtcgagggctcgatggtgagttcaaaagcttcgataaccaaacagtgcttgataataacacaacgataaaccagaacgagcacatctgcgccgcagcattcgtaccatacgagcacgacaacataaaggacccgtccatgcaattccgcaacatggcagagtccgacacgctcacagaaatcgagcacgagccaaacgactttatctggctgaaacaagtctacggtttggaaaacggcgagccggccatccaatacccaggctcgatctgcgccaacgtaggtcgagtggtcatgtacccgagcaatgtagaacacagattcacgaacttcgaattgaaggacaagactaagcccgggcggacgcgcgccgtggtgtttttccttgtcgatcctaatatgcgtatcatctccacggccaatatcccgccgcagcgtgtggattggactaaggaatttccggctggggcagatgtcaaggaaggtttgaaagatctggcgcttgataatagaaaaaacaagggagatatgcctatgaatctggacgaggctttggaaacgagagtcaacgtgttggacgagctcgagcagtttactcgctatcagcatgtggcttttgagtcaaatgttctgatgctctaatgttttattttcttcttttcctctggtttttttttctttttataataaaatttgattttttcgagggccactgccgagttgtttctgtcgctcgaaggtgatgtggtagctgcagctacgtgctactcaaaagaataattaggtaaagatgatattaaatcgccgcgctatgccattcattcgtaagaccaagtatgcacatgtcccattttgattatcccaaactccaatcaacccaaagctatatccagagctcaacgtcccttcatctcagggaactcatcatcaagcttcaggcgagccgtaacgttcatactcataagttcttgaatgagaagtttggcagcatatgggatgaccatcttcacaacggaacgagacgacttgcacccaggacaccagttcaagtagcccatgaaaccacacttttcacagacatccacctcgtggcgatcggacgagatcatgaggcgctccagcagcagctgactagtaccgtacgcaatcaaacaatcacgttccatctcaccgagacgcaaacctccattacgcgaacgaccctcggtaggctggcgagtgagagtagcagtggggcccttggcacgtgcgtgcatcttgtcttgaaccatgtgcttcagtttctggtaatagatgggaccggtgaagacgtagaaaggcagagcctcaccggtgataccggaagtgaggtagtccttgccaccatagctaaagcctttgtcgatcagaatttgggacatttcttcgacgggactgccgccgaaacaggtaccgtagccgtgttggccggacaaaacacctgctttaccggcgacaagctccagcatctttccgactgtcattcgagaggggaaaccgtgagggttcatgataatgtcagggttgatgccttggtccgaaaatggcatgtccgcctggtctgcaataattccaacaacacccttctgtccgtggcgggaagagaacttgtcgccgacctcagggcgacgggtttgtcgggtcaggaccttgatgagttgcgtctcgccttcagtggcagataacatgaccttgtctatgtaggaaggatctggcagcttgtagttcatgggtgcctcgataacatctccgccgccaatgtcggagccggggaatcccaacgaattttgtaccctaggcgtgaccttatttatatagctttcgccgttattgaccatttcgccaactgcagccagaccatcagactcgagaagcgcgtgcttgcggattggaacaccattctcgtatgtcggtcctttgagggaatccttggctccgttggggtaactcttcagcgtcgtgacgtacttgcggaagacctggcaacgtccaaagccacggtccactgatcccttgttcaagaccagagcatcctcaatatcgtagccagaataactcatcacggcaacagtcgcattctgccccgcaggtagttggtcgtattttgtcagctcaatggttcgtgatttaaccatgggcttttgtgggtagaccatgaggtaaagaatggaatcaattcgctggaattgattggaagcaatagcgccaatggcttgcttacccatggcacattggtaggtattacgtggggactggttgtggtgaggataagggatcaagccggcaacagctccaaggactgtgaagggttcaatctcaagatgggtgtgagtatttgagatgtccttctcgtagatggcgatgtaggagtcgttctcctcgttcacgtcgaggtattcaacgagcccttgcgcgaggaagtcgtcgaactccatttctccatctcgcagcttctcgagatgctgaacactgacaagagatttgccattctccacaacaatgagaggtctgcaaatacgtccatcatcagtggcgacatggacggctcgctgatggtgattgatgtaaatgctgacaaattccgaaacccggcccatgcggcgcagtcttcggaaagcattgaggaaggacttggggcgtctggtcagaccagtcggtgtaccgttgatagaaattgtgtaagcaccccgagcatagagctgctgtccaccaacactcgatatgtcttcgacgccgagcatgaatatcaagtttcgcaccggtccttcttcatcgttggttgtgatatgcgtcatgagggccaagttcttgaccaaaccacatgcctcaccttcgggggtatctgcagggcacaacattccgaactgggacggttgcaaggcacgaggaccactgaccttacgggtcttttcgaactgactgctaatacgggtcatcataccgagagctgcaatgtaactcaatcggctgagaacgtgagtgacaccggcacgctccatgcggaaacgcttcaagctccagtttcctgtggagatggctcggttcataccctgagtaatatgatttccatgcatagtcacgatagtccaggcatcgaactgctcggcccgattgcgtttgttcaggactttgtcgatgttcatcttgatatcgaaacaaaatttcttgaacaaatcttcaaaaagaagggccaacatctgacccgccagctccagtcgtttgtttccaagataatcacggtcatccactagggctgggtcactctttgccatcagaacgcgacgagccatgtgagcaacgtagatagccttgggtcggaagttcatgtctttgacctcaatatgagaaataataacagatgcaatggcctcaactgcctcttgaacgtgagtcttgcgataagcggcttgtttgcggttgatcttgatgcgacatccgatccactcgagggcttgttgctgagtgtaaacatcgacgttgattgcctcttcgaaatttatagcaaaatcatcttgatacagactatcgtcaccagtaaccatttgcatcatttccttgtcggtgtggatgcccatggccttgagcaaaatgacgattgggatgtcttcattgagtacgttgtgcttgacgtagagtctgccttttttcgagacgatgtaactcttagacttacgctcgtttgaggaactgtggatgttagggatagcaaattaagaaaggtccaacatgggacatacctggtaaccgaggcctggacgatatctttttttgggtcggtttccacaataattctgtttttactcaattgttcttgtacaagaatgaccttttctgttccgttcacgacgaagtaaccaccggggtcaagaggacattcattgaggacgcttatttgagcaggcgttttattcgacagcacacatttagaactgcggagcatgatcggaattcttccgatggggactgctcgtcggataaccctttgccggccacggacatactcaaagtcaacgagaatgggtgcagcgtatgtagtgtctcgtagcctacactcttgcggcgtgatcgtggactcgaaatcaattccaccatcgccttgctcgtcggctcgtcgaggggaggcaacgtagatatcagtaaacttgatgtagaagttgtggtccacatcacttcgaatcgtggagcttgactcgacaattttcttcatttgcacctccacgaagtagttgtaggagtcaaggtgctgcttcaccagccctttgaccttgaggaatgccggtagcaggttccatttgtccctggccgtatcgatagggtctgtgagccctttattgtagtaaaacggttccaaaagtgcatcgaatggatctctagccttgaaatccgaagctggttcaacctttccgggcacgggatgttggtgaggctcaggaacagggttggacacggacggacgcttgcttttcgtagagtcagtcgccgagtggcttccggcctggtcaagtagcaggggagtcagtatagccatcagaagttgcgacggaaaaaaagttttgttacctctgaaggacgtcgcggtcgactggccgcagagggctgtggcctcttgcgcgggggcattttggctagacagctgaggtttagagaaagcgatcaagaaatatatcccaatcaaaccactcagttgtccaaaaagaagctcgcaagatggattctcatggaggggaaagatttgagtaatttggagatggcttaataagccgcgggctggagctgatagttgcctgaggcattgacgataagaggatcatttatgtcttttcggggtttcatatattggctagctagaaggatacgtacatgatagctatagaagtgtcatatgagtgggaataataacatgaagtaggcttgccgggcttatcactcggcgacgggacaacataccttaaccttatagatgactttttgatgtgtaaccagggatagccattgaagattccggacatgcctgttaatttgactggaatgagatttgaagctctcttgttcccatttgatgactatttgggaaggatgtagctgcaatagtggaaacttttgtatagtaacgaggcagaaattcgtgatctctaatatatatcttgagacgaccttggtacggagtagatcattccagaatgaaaactgaaaatggggattgggcaaacgaaaagggcattcccgagtactttatccgttattgaaaacttaatctatctgaatctgtagttagatccatcttatcaagtaacggtacaaaatcgaaggcccggagcataccagcgttaactccgaggcagtcttggagaagcggatcttgggctatccactaaacgtgaaccgatttgaagaatgattcatgttagtatcaactactcaaatgtatagagctgtccagggctagatttacgagagccaggttgtcaaaggtttgtccattgacatggtatgtagtacatgtgggtcttttgcgcatgcaggccaccccccggacatttacgcctgcacggacacggacaaatgatcagaattgactcggttctgctcgagagagacgatctacagcagtgcatggtatagataacaacaccagatagtaaataagcggtcacgtagaagacaacgtggaaaaaaggcttccaccgcatataccaagcgctaggcattccgttcacaggatacggagtactgagattattattagtgcccatagttgcactgcttttgtggcatatgatttatcaagtactgggaacattcggtccttcatgtgcgatgtattattattttttgatgcctgtggcgaaatcagtttgaccgcaacttcgaaattgccacccttcgcttcacgggcacaagattgtacgcaatcttgccttttccggagggaattcccatatttctaatccagtgcacgaagctacagcgcaatgagtggtccaatgtatctgtcatagtacttgaagatggtattgatcgctgtagcaaaaggaaggtataaatatgtatatgcaacgccatccacacgtggttggtcagacaggggtcatcgccatccgatatgttctatgtactccgtactccatacagtatcctccgaggagataatcccgacgaaagcattagcaatgttatcgaccggggtatatccgttatcgacagcctagaaggcctattgtagggctttttcctgcaggggttggttggacagagggggcggagaccattttctggctagggagtttcagatattatttgcacaggtacttttggaagcagaatcatagtgacttctaccaagactattttacgaatgatttcgaattgtgattcgtgatatcaaaaccgaggcagccagtcaatttagggggggtgactcaggcgtcgggcatgaaagaaagtaattaaaattggtgcaattttgggcgtcaataagtgggtttcgaggctcaagcctgcgattagtgggtattacgagtgcaatcatggtgactattggatgctaggagaccaggaccatatctataagtaagtactccgtactccgtacggagtagttcgcgcacagttggggagttcggtgtaccgaggttttactccgtatcacttggacagcacagaccgtagcgagtactcagctcagatcgaaaaccataataatccatcgggattcttaacagatagtacatacatcgatagatagaggggaaaaagtggtccatgtttggcgatctctccgatgtgtgaataaataataaagatgactggggtttggagcatccccgctccatcggtatgcttgttatttggtggatcaggggcttcaagcgacgcgggatcagcgctgggtggcacttacaccgcttgtcctgacgtttagggaagcctgtgaagagtgtgatatgggggaagtttaaaaacagatttcgatgtgttcgagaaattccagaagtataaaagaaccttggattggctgaaaaggaaaaggaaaaaaggagccattggcacagacccgtggaacgagaacaaagaaaaaagaattaacccatggacgaggagctaaccgtttttccatggagcccctattttttctttcttccattctgatattggcatatactaccccaacataactataccggtaatccctatctcttccaatacttcatacaacctacccaggattcaggtacggatcaggtacggagtataggcgcctaatcattctagatggcgatctgttatcacatcttcgggcacttgggtcccatcagttctccacaagtattcaagaggggccaaatgcacctgcagctgccacgctctaccagcgcattccaccttcccctcctcacggtatcctagcacagtggttctcccgtgtatagcccaggctgtccccggtccaccatgaaattgaccattcgtagcctcttcaggcctcgcgggggctatagcccattgactaccccaggctcttcccgggacaaaagcgcccaggtcgtacagacaacagaggctctccaatcaatggaacccgatcaattcccgagtaagtgctggccgatcatctgctgtggtcaagttgtggtcggcaacatactatagttgaagtatacacaacgtgtatggatttgcaacgaacccatattatataacctcgagaatacactacgtaaataatgcaagatcaaaagattcaaaaggtcactgccaaacttctgactaaaacaaaaaagaaaaaaagaagcagaaacaaatcgaaagaaaagaaagaaaaaaaaaaaaagaaaactagagcacagtcatctcctaaaaggatatccccgctctgatctggactcccagccattttctccccctcttcctcttcttctcttttcctcccttaccaaatcccttttgtacaacagttttgtatctttcgtttgggtcattgttaggttgtatttcctcacgcgacacgctcgtttcgcccgcgcctcgatccctcggtgttcgctaaatcggagcggtaagaggagctttatcccaccctgcaactccctgctgatctccgcaccgtcaggtacacacgatattcccgctcgacattgcccatagatgacttgcgcagcttcaaatcgcatagcaattctcccatcaaccggatttgactcctctcgaggcgttcattgtgtgagttaggccctttttgcgagcgcagatcttctccgcctggtcaacccctcagcccctctctcgacttccccttgcttgagacgccgacgacacacacaccgccagcccacccttccctaccattcggatatttccccggcctccggagcacgtcgcgtcacaatatctggggctgggagtaattgcttccccggagaagctccctaaaaacaccgtttttcggcgtcaacaaattcctatatttgctgaccggtgcttgtatagttgaacaattcggcctgtccacgatggccttcaagcacgggctgagtgaacgcctcgacgagctgcgcttcccatccccacgatccccaccctcggaggctgcgttccctgggtacacttctctttccccgggtcattcaaactttggatcgggattctcgtctcgcccagctagtgatgttcgagcgaacctgcagcgtcggtttacgactgattcgagcaagttgtcgtcatggaattatttgaatccaagctcgggatctggctcgagctctggctctggttcgggccagatgcaagatcctgtggatttattgtcttcggtaagattgaaatttctttttgagttagccattatccctatgcattgaactttcgtatcgatctcgtttccattgaatggttggcgatgagtggggttatgtgaattggtgtgctggttgttcagcctctgtatgattctttgagatcaagttctgtcggcgtctggcatgtcacactaccttgcagcttgaagttgacgagaattcactgccattcatccccgcgattcatccctaccattcattccccgcgattcatctgctgctattcatcatccttatctcttatctctttcactcaattgcccattgtttcctattcatcagtttcctttatgcgtcaggcaaactcgccgaggtgattgatacgattgatgcgattgtcgcttattgatggttcaactccgtccattctgagcctattcatacttcaaatcgagtcttgctgctaggctgcgatccggtcaggattggtataagaactacagcttcacactttcccttttgcttcttcttttacttcacttcataactttcgcatctgttccatatcttcgactccgagaacgctcactgcctgtgctactttatttgccgttgatttcgcgtcacattcacattactttttctgattacgtcgtgcgttcggttggtattcctcttgcttgttctgtgtgtctacggagatatctttctatgccctttcaagtgtcttctacgttttttgtgcaattctgacaagttttgggcttccacttttctctcacttcgttcaaactgatatctttctcaaacttccttccctcttcctcgttcttttgcttgaatacatcattctggaaaccatatctgacttcttcaacagttcgagaaaaaaagacagcacattgagtacatgcgtgaacagaaacgccgtttcgaagaggatatgaaaatcctcgaccttcagcacgctcgcgagaaactggagatggaccagctcgctcgggacttggcacaggctggcatctctggtccagtcagtgagccaaccaccccgcctgagtaccgtgatactactgtgtcgagcgcctttagccgccctgctcgtttctccacctcgagcgtgacctcttcacccggatttttcaatgcttttgctgcttcaaccttgacttcccccccgcctacttcccaacctgctcagccgtcgattgaccgatttgccggacactctgtgcccggttcgcgccgaaactccgagaaggacgacttccttgccgatcctacttctcccttccgatcaggcccatcgtgagtggaaaccccatctttcgtgttgtggtatccagggcttagctaataattatttagcgctgttcaccgatactcgctgccctccggcaatccaaatggccagtctcatcgctccagcatctccggtttgaatggatcacgccttgacaccttcaacgttcccaaataccttttccccagtgaggaggacaagcctcaaagccatctgagggagctcgaacgcttgtcgactcctgacatcaagagttacatcaagttgaccgaacctgatgacaagttcccaaccctgtcccgtcgtggtgactcaaacatggtaagtttcttataattgaacacaaaacatcccgaatcctaatcatttacttagttgtcggcaaaccctgatgcccatgatctcgccaaccctcgttctccaggctcggagcattattccaaccacagtcggcaccggtcgtctcaccagagcatgccgcagaatattcacaactttgggcgcctggaacagctgggaagccaccataacgaggatcacggcagctttgtccaaaccccacgccacagtgcacgtcgttccatgggaagccagatgaccttccacgataaccgccatgatgagatagcaacccctgttgcctcgagccgtccaaatgctctgcagtcatcatactcaactaatgatctgcctactatcaagggaaatggagctggcaaagcagttactcccccgaagactcacattgagcacatgcatcaccacaataccagtatggggcgcattccccagagtggtgtgaacaaccaggtcaaagccgagttcgatgagaccgacttctatggtaatcaatcgaatttgcacgcgagcgcccctcccttcgggcctcagatcaatacggctccatctacccaccacgttcctagttcggttgctcaaatgggattgccattccaagtgcctgcggttcctgccttcaattatggaatgcagggctatgtcggccaagcaaccccgatcaacggtcatatgcaaaacttcggaggagcttccgcctacaacaatgcctaccccaactatggtcctgggttccgctttaatgaacctgcagcccgaggcaccatggctcagcgtcgccaagagaatgatgcgacccagctcactcgtttcggcaattaccccttggagcattacaagggtgagttgtacagcctgtgcaaggaccagcatggttgccgatacttgcagcgcaagttggaggagcgtaacccggagcacgtggagctgattttcagtgagacttacatgcatgtcattgagctcatgaccggtatgaaacatttaccccttgcaccctaacccattgtcattactaaccttcatcctcgaacagatccatttggcaattatctttgccagaaattgctggaatactccaacgatgaacaacgcactgctttgattgacaatgctgcccctgagttggttaagattgccctgaatcagcatggtactcgtgcactgcagaagatgattgaatttatctcgaccccgcagcagactcagacagttatcaatgcattgcagtatcatgtcgttgatctggtgcaggatctgaatggtaaccacgttattcagaaatgcctcaaccgcctcactcccgaggatgccgagttcatttacgaagctgtcggaggcaattgtgtagttgtcggtactcatcgccatggatgttgtgttcttcagcgttgcattgaccatgcttcggggcatcaaaaggctcgtctgatttcgcagattacctcacactcgttcgctttggtccaggatcctttcggaaattatgttgtgcaatacattctggatcttgcggagcctagcttcaccaacccgttgtgtgctaccttcggaggcaacattcctcagctgtcaaagcaaaagtttagctccaatgtgattgagaaatgcctccggactgctgataactacatgaagcgcgagatgattgatgaattcttaatgggcaatgagctcgagaagatgctgcgtgattcatttgcgaactatgttgtccagactgccatggacttctgtgacctcgacacccgcaaccgcattgtggaggctgttcgtcctattcttccatctatccgtcaaactcctcatggtcggcgtattgctggcaagattatggccgcggataccaacagccgcagcaatggtagcagtgctactaccagcggccaggtcacccccaatgagttgagcagcagcgcacagatccccaaggccttgctgcagaagcccttcgcataccaccaaggtggtacccagagtactcagtcttcgagctcatccggcggatacagcaaccagccctacgtacctcaatcctcccagagctctgtctctaacactccttctggacaaagtgacacctcgtctgtttacactgcgcccactcctcagctgtccgcaaaggctggatcgcagcaagtccagaactacttctgattgggtctgggatacccacatcagtgcttgtctttcacacccccagtgtactcatagtgagacgatgcgacgaaacatttcttttttttctcttcacgattttacggttactttttacactgtcatcgaactgggcctacatcaactgcacatgccatgatcatttatcccatgatttaccacacttgcgttttactgcatacaccttcgaagcaatgtgccatgatcattgcatttggccatgttgcatactgcattttcatgaagcgacccgtgcatgatgcagagctcgttggaactatgttcctctgctccctgtgtttcgcaacatcttgtatttcttgttttccattcccccctttattttcccagttgcctttcatacctaggtcttgaggatatctggcaatagttggatcgttcatcggaacaatctggtactccattgccttaatttgaggactggttcgtttggcttgggttgtctttcttcttttttttcctttttcgcttccacattgtgattttcaactcttatttttttacccattcatcgttgtacttttgcgctttgctcttttcgaactgcgttttgtgtcgtgcccatccttcacattggttcattgtcgcatacaagctgagccgagcatggatattacaatgagtatggagcctttgttcattgatgaccttggttgttttccggccagcttattgcttcctcagattgatgatactgccatttggtactcggaccagatattcgtcatgcatgatcctgcacacagtttttgcatgtattttagcaatggaaagctgaattaagttttcatacaattttctcaatatccaactctagtagatttctatttctttgtcttcgtagttcattaagtttccgaggttgtcaactctgcagcgcgacgcgtgatcacgtgcgtaccaaccgagctgcacttcggagctttagcaggataccacaccttgcttttgacaccaagtcagcctacaaggtccaaaccatttactgggcctctcatgctaccaaaagaggttgccagctcattgagcacacaatggccatgtcgcaatgtccagatgcggcagctagccagtctgttgaatgtgagtttactatgcattccttccattcgccaatcaccctcggagaaagtgactgaccctcaatatttgaatagcctcacgttcctagccctccaaccttggttgtccatggtatttctgcgacctgcaaatcgactatcctccgggccgtccttgctaccctcgaagtgccacacgccattgtcagaagttcggaatgtattacgggacggcatctcctgacgaaaatactatggaatacactggaggcactgggccagaaggaagaatgggagacctccggcaaaggaagatgcgagcacgtcagtggccttgcagtcttacttgaggagtgcctggcagcgaggcccgttcaaacgctaggcaaattcgtgctggtgctggatgagattgacaggcaaagagaggcaccgcatactttgctctcggcgctggcgcggctaggcgatatcgtgagtcgccgctttggacgacttttgcaagtgtaaaatgttgctaacccgataatttgtagattccatctctttgtgttgttctggtcctcagctcgaccccacggccattattcctccaaagtgcggctgttccgcacgtcagcttccctccctatacccgcaaggaggctatccacattattctcagttcggacgcgccggtcgtggatgggttgcccgatgaaacctcctcgcgggtatacccgtactttgtatctacagtctacgactcattggtgggaccaacagcaggctctataccggatttccggtccatatgtgaaagattgtggcctcggtttgttgcgcctgtagtgaatggcgaaacacccccgggcgggaacagtgagtgggatttctcgcggttgcttgtcaaaaacagagtcatctttcgacatcagggcgagtctgcgctggtgcaccacattgttcccgatgagactcctgctggcgagaaacggaccacgctggcaaaaaccgctatgccttcggccctcccttctctgccatatttctcgaccttgatcctcacatccgcatatctggcctcgcacacgcctcaacgactagatacaatcttcttctctaaattctcctcttcatccctttcagcccggaacaagcgtgcccaccaccgtcgacgtttgaaagtcctctcccaagcccaggccgaagagagacaagccgcaaacgatgacccttcaacccccaacaagaaaggaaagcgaactaaaactcgcattacaaaatcaacactatcatccgcctttgcgacctcctcggccaccacatcagctgtcggcggtggcgcaggcatcgccggcccgtccaccatccttacagcccgttctttccccctagaacgtctcctggccatctaccatgcgatcgacccaaaccccccagcaacaccacttcgagtttcagccgttgcagaccgtatctacgccgaactggcaaccctgcgacgcctgcggctcgttgtccccgctgctagccacaatgccatggcgactagtagtgggaataccactgccgatgcgggagataagtggtgtgtcaacgtctctggcgactgggtcggtgagctggctaagggtattggtgtcgaggttggtgagtggttggctggcggtctggactgattcgttttttctttgagatgaaggagttggtctttgtactggtgctttgttcttgcatttatcaacgggagttcttggcttgttggccctgcattgcatactggttttaattatggttaggtcaattatacccatgtcatcgttctacttgatcattgcctatccgtatgccagtaaaatgcttgcttatctcttagttgtggagttgcgtgttgctgcaaggccatgttcatcgagttctccctcgaatggctaattcctacggtgtgcgcaggggtatagattcggaagatatcttggagattcgacgtcgctaatcctccagtgtacctaacaatctatgctcgcatgcaaaaattaatcatcatacagcacaaatccaatacctgcattcgaactccaacaaggaataacaaagtagctgaaaacccaatcgccaagaaacgccaaagactatgcgtaaggtaagatccttatagcagagaagatggatgaacaaaaaaaaatccaacgccataccacctaccaagtccactgctcaaccacatcatcagtgccaaccaacaaactcggtccatgcgggccccgccactccggggtatcattcccatactcgaatcgcacacagctaggtggtgaggaatattgatgccctgtgagaggcgatgagacctgcagtccggtttggagagagaatagctggattttgcagtcctgggatgctaaagtgaaatgtatgttagcattagacgaactaaaatcgggatattctgatttttgaggggagcatacgactagccagaagaccgagctcggtgctcagatcgaaggttgggaacggtagtgaagagaattcggggaaagttaggtagggctttgaggaatcatgacgttcaagcatttttggcgcgaagcggaggtcgtacattcgtagctgaggtgaatgtcagttaaaaccagcccggacgtcgtatcggatagaaaagagaagaagaaggcgtagacagcgtcacataccgagctaggtcccgccgccacgagccggtactcgtccatctgcttcatttccatcacagcatcgttgtgtcggagacgtgtggcactgccaccactgcgcatgtcgtggaggaagatgttagagtttttctgtcccgccgcaatcacgtcctgcgacatccattccacggcatgcacgctgcgttggctgctgtgcttggggggtgctctggtgcgtgtgggaagtatattgcccttaaatggtttcttcgagagggtccaatggctactggtaccctctagggtgtgtagcccttctgaagttcctatggcaaagtaggcgcttgatcctgcgggctgggccgcggagcaccagaaggacatcgggtagtggggtctgatccgaatcgggtgagagactggaaggtcttgggtaagcacggtgtctagggatagagatacatataaagtcgtacatgttggccagcggtagttgccgccttcgtcgggctctgggaggagatgggccgaaaggaagcagtcaccttgcggtccttcgttcattgttgcactagagttgttagcagtgagtatatctaacagccttgtatggagacgtacagtaggtatcctgagtggctcaaagacatcgatcctaactagaatggggtgttaatgtgccttcaatggaacgaagtgctgggatcgaatgtgctcaccgaatacggctccctgaatagcacccgttccatggtgtgatcatagctccactgtgactcgtcaatgtcaggaaaacagaccctactcgctggttagtggtaattgacattcgccagcgctcatcaacttacgacacagacgattcatatccgcgagccgagccttgtcgcgcgtgttagtcacgtttcgagatcataaaagccagtgaaactcaccggcaatcaatgtcccagaacgtgggttgcgcaagacatatcggatactgtacgagctaggccatggctcgaaacgatggagttctccacgatgtagttggctggcctgaatgcgagcctgctgttcttgtctcgcacgggaggaagattcaatggctccaatctctctttggaggttgaccaagggatgtctcaacgatggcgcttttcggatcatctctttattctcacgttgtctgaaccgtgttttgttttcatgtgtctgcgattgattagcgaatctgatgaaatacatagatccctgctactgaccgctagctcagaccgctttcgcttcacggattgctgcgagtattgtgcatttgggggtgcaacatggttggcttgaatcttgaagtacttcttcttctccgggtctgtgatactcggtcagtgtgtgtagaagggtagttgatcactgcgtgtataaaacagtggcatggctagacagttcgatacagcccgtatgtgtcgctggaagtcaacagcccgcgcctttacgtactgtcctcgcgcacctcggcagaaggaaagaagcgcagcaaaacgcgacgtaccataatagaaaccagggatttcacgagtcatagttgctgataatgtgcgatgtcgagaaggtagatatcagggaatgcacgaagagggaaagtgacccagctatgttcaagttatcaagatagtcatgagccttccactttcgagtgtctagcacaaacgaacaaccatagtggattcgaccccaacaaagctaagcatgaatataaacaaacacaagtctatctgattaaccatatgagatgtggaagatcttgaatcgatttacatgaacaggcagttatatcagacttgaatttgaagacccgtgagtgacgtgagattatgtaatacatcatatttgtgcctcaggccgcagttctgatagctgccctaaacggcagtacacttgaactgaactgaaacatcttttgttcttgtttttgtatttgcttctgcttttgttgtgctttcattttgaatttgccctaatttatctaacaagattcacattgattaactccaagttctgatttcccacatttaatacacatatgccaatcaattgaatggtcgcgctttccaattgaatcggatattgcgaagagtcaatacattcaccacccgaattgcactcaataccattgactgaatgtcaactgagagcaacacagtataattgaatatttgaagacaccttgttatttttgcttatctttgtcccggtgaggcttgacaggcaaggcgaagttggtaatgactcccaaagtttcaccagccgaacaattgatgtcatcgtgaatataatttctgtcacttcttggacagattcctttccaggaccagggtgccgcatgattcattgtcacgccgtagcctgccactcattgtcaggttccgataagccagtataccttcttcaagcgtatggccggtcagtatcctgaatcccattgccgtagtttcgaagaatttctatagatagaatgaagaggcaatttctgacagtatttgctcattctccataggccgataatgacgctgcatgtcggaaaaagccctggcaggcggaggcaggcgtttgtaatgggccatgtgtcctcgatagtagttggcgcctagtcatcaagggtcgttccttcgatataaaacccacgatgccgaggctcggcgtttccaatattttctcctacaacacttgcaaccctttttctttcttcttcaccttttatcaccatatctcttgaagccatagcatcaatcccttcttctaggtatgtatcttcctggattattgttctttcatccgttgagagctgggcgtgcttatctgaagagcaaaatctttcccctgtgacttcccgttcatgtttcatgcaatttgctgtatcagagtcagtgatgtatcagaccaaacctcttgcacaaacctttgaattgaatttgtctgtttttgtttgatagtttgctgattcctttcagatcttactaccgtttcgccatcatggccagacccaaggttgacccgatggatcagcggaacgcacctctcaggagtcatccgcccggacctccctttcctgaagccagggacgagcatggttctcgtattgtttttattccgccgtgtggaactttctctgagagcgaccaacggggccgttcccaggaacagaaccaggagcataaccaatctcacagtcctttcaagcgacgagaccattctgaactgcctcccattcagaccagtctcctggcaggggtggtttcagattcctcgactcgcccttcaggtaattcgaattcaggccctagtggagagcagcctttcctgtccaagctcctcgacaaatctccattccatccgaacaagaccaccacttccggagaggaaaataaaggccatattcagtcgaagcacgatggttcccaagaatccaaggatgaagaggaatattacaagtttcgtgccagcttgagcaacagcttggaggacacttctcctattgaacagcaagacgaaagtggacagagcgacagcttgctatccgagaagaaagatcaggttagactgttccgttccagtctacttgctggtgccaaggcccaggaagatcgacgccgttccaagcgcactccgacatcccctgaccatcctcaaattggtcctaatgcggtttccgaatctgaaacgcatgcttccatcgttagcgagagcaaagactgcgtcattggcgttaaagagaacgacgacttttctctcccggagacattgaaacctatgacctctttccaggaagagagcgaagaatctctggattgcctcattgatgaactggaggccgaagatggcaatgaacctgacgatgatgcaaccactctccgagctggggaaattcgcccattccctccttccctgctggaaaccaaggtcgacgagggcctcaacgacgcagaggtgaccgttcggcgcaagaagtatggctggaatcgcatgaaggagcagaaacggaaccatttcctcaaattcatctccttcttcaatggcccagtccagtgggtcatggaggtaagcaagatcatcattgaccactatagcgtagttggaaaaaatatatgctcacactgttttctcaattacaggttaccattcttctagctggcggcctgcaagattggatagatttcggaatcatttgtgccctgctcatactgaatgccgcggtcggatttgcccaggaataccaagcggggaacattgtcgagagcctcaaggtaactcttgccctgagatctctggtcgttcgtaacggttgcatcgtggagataaatgccgaagacctcgttcttggtgatatcattcacgtggaagatgtgagttcatgaggaaataggaaaaaaagactcaggctaatatcccattcagggcaccatcatcccggcagatggcagactggtatgcgacaaggcctatattcaggttgatcagtctggaatcacgggggaatctctcgctgtggataaacacaaaggtgaccctgtcttttcttcttcggtagtcaaacgcggggctggaatcatggttgtgacggccactggtgatcacacctttgtcggaaatgcagcggtcctggttaacaaggctggcaataacgatggccactttactcgggtactgcgcgaaatggcccgtgttcttctgattctggtgcttctcaccctgctggttgtgtggatcagcagttattatcgctcaaatccgattgtccagatacttgagttcacggtcgcaatcaccgtgatcggagtccccgtcggtcttcccgtggttgtcaccacgacaatggccgttggtgcgtcttacctggccaagcatcaggctattgtgcaaaagctctcagctatcgagtcattggctggagtggagatcctctgttcagacaaaacgggaacactcactcgtaacagattgaaattgggagttccatatgtaacccccggaatgagtgcggaagagcttatgctgactgcgtgtcttgcggcaactcggaaaaagggcggcgtcgatgccatcgacaaggtattcctcaaaggtcttcgccactacccgtgggccaaatctcagatcgcctcgtacaagactcttgacttttctccatttgatccggtgtcaaagaaggtcactgcctatgtgcaagctctggatggtgagaaggtcctttgtgtcaagggtgctcctatgaccatcctgagaacagtggagaaggaaaccacattgtgcgagccgttcttcaaggaatatgaggataaggtcaccgagtttgctagtcgaggatttcgtgcactcggagttgcccgcaagcgtcaaggacggccatgggagattctgggaatcatgccatgcctggatcccccacgccatgacactgctaagacacttgccgaagctcaagaactgggactctctgtcaagatgctcactggggatgcggtggccattgcacgtgaaacggcacgtagactcggtctcggaaccaacatttacaatgccgaacgacttggtgtcactggcgccggctccatgtccggctcggaagtgaatgactttgttgaggccgctgacggcttcgcagaagtctacccccagcacaagtacagtgtagttgagattctccagcgacgcggctatctggtggcgatgactggcgatggtgtgaacgatgctgcttcgttgaaaaaggcggacacgggaattgcggtagagggcgcgtcggatgcggcccgctccgctgctgacattgtcttcttggcacccggtctgtccgcaatcatcgaggcgatcaagatcgctcggcagatcttccaccgcatgtactcatatgtggtgttccggatcgccctgtccattcacttggagatcttcctcgggctctggatggtgatcaagaatgagaccctcgacctccgcctgattgttcttctcgctatctttgccgacattgcgaccttggccattgcatatgacaacgctacttattcgcagtcccctgtcaaatggaaccagccaaggctctggggtgagtcaattgtcctgggcttcattctcgcagtcggtacctgggtgactctgggcactattctgttgcaaggcgaggacggcggtgttatcgaaggctggggttcacgagatgaggtcttgttcctggagattgctctgactcagagctggttgattatgataactcgcatcagtggatctaaatcgagatcgttctgggcaaactgcccatcattttaccttatcgtcgccgtgggtgctgtcgatctgaccgcaaccttgatggccgcatatggtgccttcggtcaagccacatcctggttgaccgtcctccgtgtgtggattctctcctctggtgtgacatgtgtaaacacactggcttacatcttgatgcataactcgcaaaggttcgacaaccttatgcatgggaaaagtcctcgaaagaagtacggagagcgctcgtgggaagacttcggtaagttcgcacagactcaatgtctcctcgcagaattttaacgggaaactaaccaatcataggccttaacatgcagcgaatggccaaacaacatgagaagaccacttagtggtggctcgtaaccccgcatactgcaattgatgatggtgatgaaataatgatatgatgaatggggagatgcctctaatcgatgcattttaatgattttattaaatcaaggaggacagaagaatggaaggggacaaagtcttgtttctcatgaggcggccatgcccaaggggttgaggcctgcacgttctattattatctggacgctgaactgtgattaacagaccctaatttttaagtgattatcttgactcattgcctgctattgtatattgctaaaccttttgatacagtatcaattttggattgattattgtcacaataccttgaagccttgacggaattggctgacatttattttggagaaaccgcatcgctgcggccttacgaggcagtttgacaatcctgtatagttgctggtttcattgtcttctcacatacgatgagtcaagcatgcaatccaaaccatatgacttcactgactactacagctgagatagtattacctgtttaccgctaggcacattatgcatatacccatgaatggaaatacggcctaagcaccccggagcttaggctggatagcgaccaagcggcttaaagaaccaaggttttaggattgaaacctttcctcaaaccttccaacattttccctgacaaccctgctaagctggatgtgtatatgcagccttccaagctcgctatgactggtgataacgtgattcaacgagaatatggagaagtcataaatcaccaaacatactaaaagtggatattcgtttgaaataacattgaaaccaatcggctttgatgtcttttgccgcaaaagtctacggttctgttcaaaatatgttaagaacctggcagtttggtctagaccatgatatgttccctcccgtctacattggaagtagggctatttgatggtgtcactagctagaaatcatccgtctacataactacataaaatgacataatagttgattatcacccttgatatctggattgtataagcttacaagtttagcttactctttgacatgctctttggactgaatttgaataaattacacaaaacaagaccaaggctctgatgtctcactttggaaaaagtacttgtacattgttcgtgtcctaaaaagcccctacatacaatggcaccgatgtgccttcaacagtggccgaactagaattgcgccccccaccgtaatccacccgaaatcatttaccgagcagttctgcctcggtgtcggcctctttctgaaatcgcttttgtcggcggtacatccgccagaagacaaggctgccatggatctgggctgcggagaatgccagatgcaggaccggcgtgacaaccttgaaggcaagtcgccaccggtcccacgtgcttccaaacaaccacatcgtcacaaccgtctcggtgagtgtccccactgcggttgagaagcaggagatgaggaagatcctgctcaggagctggtgccgtcttgggaagacccggtagaggatgatggcgaagtgggggaatagctcgaacacggcgtcgaatgcgcctaagcccgaatcttgttagaatttttttcgtttcgcctctagaacagagcctcataaactcaccccagacggtacagaggacgaactcgatatacgtgtcgggttcacgtaaaggtcgcagactgatggctatggccgcttggccaatgaagattgtcccaacgtggtgcatcacggccacgggtgacaacttcacacggtagatcagctcgaaaatgtagatcccaatcaagatttgggcgaccacaatcagcatatcacccagtgtcactactgagcctttgacaaagggcgtattgaatgacggccctttgcagaaagcaacactgatgaacggatatgcggcgactaccaagataatgacctttgtgactccagcaatgtggtgattcacaaagccacgacggttcagctcgctcatctctgtgtagatcgagccgtacagacggcggataagaaatccctcgaggacataaaaacgaacgaggaagaagatgaccagtacaagagaaatgatcaaggctgaaaatggtgccaaatcggagattggccctagttgttttgtacccagggggattgggtgagggtgtcttttggaaaggtccattgtcgcagcgaatggacaagaaacgaaacgaaacgaagtgacaggaagtaataaagcaaaatgatgcaagaaaacaaagaatgaaaatcaaagcttgtaatacgcgttattcgcaacacgcgttggacacctgttgactgtgaaatcggaaaggttgaggagaattggggaaggagtcgtaacaaagaccggacgtagggcaacaacctcagcccccgtggctgtagacagcaaaccccgcatatccccgtagaaattgatctgcctgtactaaaccaccccgatctataaataattcgctgaccctatagtatattcagccccacagaacatacgaagttacaccgggctcactgtttctgccttggaaatggggttttcttgtcttacattgaaataagcttttacatatagatggtatatggtatatgagctagtagataaacgagagaacccgagtctctagtcttagacaagcagattggtatacagatccaaacctcgaaaggaaagattaagcccgaagccaagctttgcatgaaccgcggcaaaagcttaagtagtgggtaccgcaggtactctgcatgctgattggctgtggtattctcccttaagggtcattccccttactaggatcggttactacaccctgtttaggcaacaagataaataacaaggcggtctgcccaatagagcgtggatatactatatacatggaccgtgaatagtggagattgcgggaattagggaattaggttgcctagaaagtttcaaacttcggaaactttccggggaaaagtcaattgggaattgtatctaaaagactgacttcatgaacacaatacaaggcgcggctacctacttagatgtatatgacttttaacttggtaaatttaatgaacagagctgataggcaaagactaggaaatcaatagaccttgagaatccctctgggaaatccaccaatggctagcttgaatagcaatggccagcgcaatgctcgcaaatctgtcaagacataagcgtcggagaaacagatttctccattcgtaggaattcctcgtttacgaggtccattgtgttcccgaaatccagtcgtaatatagaaagactgtatactgcactttcagaatactacctggaaacataaccaatgagaaggttatggtatacttggtcgcccggcccttgctgagtaggaaagctggggccctgggcgtcaaactttgcgctttaattagtgccactgcttctgctgcagaatagattggaagggaacaatggccgtgctacctcggccacgtgttatgttgtttcaacgctaacccgaattcgatcgccggaggaacaatcatccgaaagggagtaatagttgccttgtagtcatttctaatgacttttttgatatcactttgcctagtaaagtctgctcatttagagcaaagatcatcaatccacacatttggcacttggcttttattaccagaagtagactgccggagaaagccacattcaatggctcgagaccttggaggcttcaaacgttaccacagaatcgtaccaagtgctattttccgctatgctacatttaataacggtgctctttgcagtttggcaactcatgccgtaacgggatacattgttcctgcgacccaagccaacatccaatgaatggtagtttcaattgggcagtaactgtccaatttgaggatgatggtgaatggatcatacggtcacctagatctgactatggtcaattcccgagtgaattgagcggacggcttcttgcgagtgaggcttcaacactgaagtaccttggaaaggttgcggatattcccatcccagaagtttattcgtataggtaagagtatatagcaggagatatcgactcattcactaaactcaaatagtgcatataccgactattgattagcgtttcctatatcttaatgagtaaggcacaaggatggccgcttcaaaatgtctgaatgataatttcgagttaagggaatgcatgtcccggggtcatattctccacgaacggtactctttagacgaagttcctcgtggtccttttgcaacagagtctgagttctacaacagtctgataactgccgtgttacatcatgcagagcccctccctcttacgccgcactgtttcgttgccccaataccttcccgcgaggactacgagaacgatactgcccatcaggatgcctgtgatctttggaacggctttgtggccattggagacaggattgattccgcggagaatcggttggattacatcattgtgggagattccctcaaagacatcatggcccaacgcacaactggctacttgacacactctttaccggatccatttcctctgcatcaccctgattcaaatgccggcaatatttttgtggacgacgatttcaatattacgtcaataatcgactggtcattttgttcttccgtcccactggcgatcctattggctcctcctgggctcccccaatcccgatatgcacttggcaaggaccttatcaaggtctttcgggaggggtataaggagacgtcccgcctaaagtgtcatatagaaaggcagtcgtttctctcttccgacgcgctcgctattctagaggacagcgagttttcctggtctcttattagacttcttacgtttgaatcgaccgacgatttgcgtcttttccgtaccctctggaatacagttcacactcctgactgtgaccttgagtcttttatcatctcacagagacacttgccccattatgtgcgactgtacgaaaagatgcaagtagaaacaggcctattgctgaacaccaaatggcaaagggattattttaagattaccatagatttgacagtggcacgcaatctcacggtggttttcaattcgaatgcatgctataaaccgcatttgaatcgttttcgaagtgcgaagatgttcatcgcggacccgaaactatgggcatgggtctcgaaggccaaagagcagcgcgctttatgatcagactcgaggggatacagtaagtgcgttctgggccatctaactaaccacaactaggtcagatttctcttccagagagattgctatatacttcatttatgtgaaagctgtctgacttttgtatacatcaagttccggatttgctgtcatcatggcttagctgtagtggtatatatgtaaccgtggtaggtaatggatcagataaaatgagttatacattatcacagaattctatttacaaaatagcaagggtatcatttgaacatgcagaacgatggcatcatgagatccatgtcacccacgaagatttctattctataatatcgtaaagtcagcagctactcaactgaggtggagatagaaaaagacaatcttacctgtctaagagccatcctcctctccgaagctcgtcgcttccaccctttcataccgatagtgatgaaaataacaccattccaaaagccacgcagggaccccaacgtactcacagagagtagaagcgagtaagatccatgctcatgatgcgcgaattccgcgatacggttgatggtcggtgcaatccacgttgctagcatcgctaagaagaaaagcgacggcatgatcacatactgcctcagcgacacacgtctctgtttcggggtttgataagtagtcgaggcgtttctggatggaggcggacgctggaacgtattttgttccgtgatatcgcttgttatggtagattctggagtcaacccagtttttctccgggaattcgcatccgcgcttgtcgtgatgctgctagcggagttgttagaggtcagagcgatgtgatcgtcctcgctcaatttgaactcgtcgcgcactctggttatctcgataccgatgagagagtacagtattaggacgattactattatcagcctgttgtggaactattagaaaagtgcttgggcgggcgaatggaagtatgcgtaccatacgggtgcatagtagaagattatgcgcaggatcatccaactgcgagctactgagcaccagatctatagaatttttcagcctcaatgtttagcttcaagtcgattggtactcacggtttcgtcgccatatataggacctttctcatgaccgcggatgaagagaaagacaaaggcaggtatgaaggagagagcagtgataacactaatgtatttgacttcgagcttgcgcaaagacagagtatcaaaatgatagaagacaaccaagtatgtatccaaggccattgcgaatgtccagagcacgtcggctactggaaacctatatttttggggttagaatgtctttgcgaaccaaattgcctcgacaaatctctgtcaataccacatacatctgcagcgcgaagccttggaattgacatagcgacgaagtatccccagctgcaggtccactagtggatatcatggtggcgacagagtcgaacagattataaaaggcattgaaaaatattatacgatgaatagggctccggaagtgtcgcgagagagcaaaggcgccgattattgtgaatgagcccagaatagagagcactgaagagattcgccctgcaatggcaatccgattgagctcctcgggagtgtacgacatcgctcagaccataacaagatcaacagtcacaagaattgccaacatggcatctatttgaatttgattgaaatgaacaagaagacatagagtttgtaatatcacgttgtgccgatgagtattctttgtccgggatggcgtgcttttacgtattcaagactcgacagaatgaatggcatttgatgtcaaaacgctaacaatgacggagtgcggagtacacaaagcctatatataccgaaatggcgctatttcgagagctttaggttctaaatagcctcataactcttgataatggcgatgaagctgtgtgtccagatcaaggtggtgggctcaggccatgtagttccagccaatcatggtccactctacagggatcaagcagcttatgcgctatataaacaaaccaattgctaacaggttcctggatttagacaaacaacgccatgaccgcgagtcgaggccatttgccccttggtatctcgcaggtcggacaatagagacagccctaagaatgtagtagctgtgcctgtctaccatttggggatcgtagtcttaccagtgtcagggcagatgccgatctgtgtgactgcttccccttttcgttccgatcgggatctcgtgggacccacaggaatggccggacgctttcgatcggacccgacccgaccctgcacggcccagcgagacaaggtatgtaatgtgaaaggagaaagacccttctaagtacggagtaggttatcttgtctaagtattcgtgctacatctggtttatttttaaacagataaggagaaagttcggagacaaagagtcggtattgtcgctaggaaagaacatgtttcagctacgccaagaaaaatcaaatatttaactcgattatggattattataaactacactacacaggcaaaacaaacaaaacacacccaaatccttggttccgagcaagtggcattgcgcaagaagccggttccataggataccaatgtgggagcaacatgagcaaaggaaatgaaagggaatgagagggaacgatatacacagcgccggacgaacggagggaaacatcgatgcaaaggaagcgatggattggccatcaggtccatggcttccatcaaggaatgagagacacaggcgcaaacgcaaaggaatatgtaggagatatgtgcagtgggaaagggagggtgtcataatcaagtcctcgaagtcaaatggtcggcggcctagtctttagttagtatgatttaaaacagaatgtggaaggcaatttaccttgtcaaggttatagtcatacttctccaaggcatccaaggactcatcccgtgtgaagcccatgccggtcagccgctgaaggatcaggtcatcgccagtgtcgttgttcagagcccatccgggctgcttggatttcgcatcgttcgcgtcttcgccgatatcaggcttggcgttgtcaagaggcgcaaagagagtgtcccattcatgcagcgcagccggcttgggttctcccccgttgggcgatccgaccggcggggcggcggatgcatggatattgttgtcgaaagcaaagaactgagacgagctggattgggcatcggcaccggagacagcttgctgcttctgggacggggagtcgaaagagaaatcaaagtcagttgtgtttttggcctcctgaccctgtggctcgtcgtcgtcatcgtcatccgcttcgatcgcgggcgcaagattcattcccgcaaatgctgcctcaaagtccggtcctcccaccttcgctccaccgggtgggatagcagcatccgagacagaatcacggttggtctcattgcttacaactggcgcacccgtggtgtgctccactgaatgaggcgcatccggtgccacagtcggatcgccgcgctcgggcaataggccattgaattgaggaggaagatgaacgttatcttctttagctgtctcgtactctggagggctctgcagcaccccaggagatgggggtttgtttgaggttcccgggacagggaaagcagccagctgagcggcgtcaatggaatcctgttgggtctccttttggacatttggtgcgggaggcgtgaaattatcttcgaatccaaaagcaccctcgtcatcagagctctcatcttcgtcatcgtcatggtgtagctcttgaatcggggggaattcggatggacgtgctgatgcagctccatttggctgctcagctccaggtacaggcttcatagaagcaaacgcctcctcgaagtcgttatcttgctgggattcggaccgtttgtgtgccttgctgccgaacagttcgtcaaagcttaggtccttgccgtcttcgacctggctctcattggcgacaggagttgctgcagattggggctgctgaacggttttggatggctcggggaacctaactgagaggtcttgtccttcctcctcaaacggggaccgtgccggggtgccttcaaaagttgaggttggtgcacgcgtgtagtcgctagattctgccccggatgtaggtccataatcactgctagccgcctgggaaggcgtagcgattccagaggtttcagcgccgccgaatcgactcgcaggaggcgagaccatagtagacgacgtcacagactgattatcgttgaactgcaggaagtttggggtcagttgtcgggactgactcgcaggcggtggctcagagaaggccccagaaggaaatgcaccaggcaaagagccagggggaggagagactgatggggtcgtaacagcagaggtaataggagatgtgactgcaacctgtggcgactcggagcggaacgaagtgggtggtggtccggcagcagggaaagctgcgaatggctgtccgaagaggctgtcaaatgccttttgctgatcatttgacacatcgggggaccgtgcctgttcactcgagctaccagttcgacggaaaaacgggttggtgttttggcttgtcgtagaggcagcagggcttacaacatcggccacactgccggctggtgttgcagactcttgggaatactgtggggtctcattggccaggctgtcaatttcaccctggagcttgtcccgttcgccttcgacggtagctaattgctttttgttaatggcaacaagacccttctgttggcgcgcagaagatcgcgccttctccagtgccggcttgagctgggcaacttcagcattggcctggcggatcttctccttcaggctggaattctcctgctcatcgctagccaaggctgtcgaaacttgcgtgtattggttttgcaaatcctggcggctgccatccagcaaggcatattgctgctgcagtttctgcgtctctgccttggatgacttgaggcgctcctcgagtgccttgaaattggtaacctcttgctcgtacattgaccgtgcttgcgcaagacgtgcctcgaagtcacgcttctgctgcgaggtttgtgtaatgctttgttcagcaaaggtcctcttctcctgcacagtgtgcatttccttggccagagaacctatttggttggacaagttcgccagctcagtagtctcattggtcaacttgtttgattcttcggggtcattgtcaccgaggagatcatccgatggaggcgggggtgagcgaactgctctcggggttgccgccgatgcaccggtgatctgtggctgcaagctctggccaaatgtagaggttggaataaaaggcttgaaggtttgcgatgctgtctgaggggatgccctagaggaaggcgagcctggagtctggaaagcactattggagcctccggtagactgtggcatctgaggctgggcgaatggcggcgcgggcgaatcgaggccgaacaaatcatcagcagctgtccgcacaacgggggcgggagccgggggaggtgtgggggctgccattggtgcgggcacttggcggcgcatattgggcggaatgagcgcgggcgggaccacctgtggcagcggctccttgccgctacgctgcaatctcaccaagtacatagccacggcaaattcttcccggctcagctggccgtctgcgtcgatatctgcaaggtcccaaatttgggcaagcgtctcttcaggaagctgggccttcatgaagaaagatacagcttggtctccagtaataagtcccaacttggctgtgtcaacagtctcgaatatgctatcaaactgggccttctcttgtggggtaatcaaccagtcaccaccggtgacctgggcggaaagagagcctacaaagggggagcgattggcttgattcatagggcttgtagttcgctgagggccagtaaattgctggggaatggccgggatggggggcacatcgggtctcgccccaaaagacacccgtgcaggaggtcccctgcgagctgccgcatcgtacagaccaggcgggagggtcgcagggataccgcgcagggcgccagatttatatgatgtcagtagatgcatggcaatggtaaactcagtggcatccaaggcacctcgctgcttagtgtcagacaaaaaccagatgcgacccagaacctcatttgggagccgagcgcgttcgaagatctgttttgcaatttcgcctatagatcaaacagcgaacttgtgagattggcaccttatctgcagggaagagctacatacctgagatcatcccgttcttgacgtccgacttctcgaacagcgagacgaatttattggcatcatcaggctgaaggggtggaacacgaataggtccattggctccaggtggagggcttttggttccggattccgggacgcttgccgttgtgtcgaccacaattccgtcaaaacgaggcagagggccagctatgaataggtgcgcgatcagcatggattccacttctctgaagggaacatcactcacattgcagagccaactcgtccgaaggtgcacggccagcttgggcatgtccaattaaccgcagaacaatcccgaagccagatggggtcaggaggcccctgttctctttatcggcaatttgccaaatctacaagacccctcattagctatccctctcactattgcaatctaacacccatattctatccacataccaggccgagagtatccggggataggtgagtcttctcaaagaatggaacggcgatttcaccggtaatgaccccgaggttggtggtatcggcagcctggaaaagctggaagaatacgcgcttttcctctggagtgaggtgaagattcgggtgtcgctgtgctaaaagattgtgttccgtcagctccgctagatcgcgcatatagagtgcgagtgcaagaaggggaggggtggtgatgacggaggtcggcgggcgtttcccttgagtgcgccgaagctctctcacgattcgtattggctctagcaaggaatattaagtattacttaccggtatcagccattgcagtgtcctaggaggagcttaactccccgccttctaatgagttcacaatcgttgggtgccttggtggacaagttggagacacgggatgctgtcagcctagtctgaactcgcaacaagcatgggcggagcgcagtatttgacagggacggcaagggcacgagatataggtaaatctcgagctccaaggaggaaataaacttcaagaggaatggggattgaaagtggctggaatcgatgtcgtagggaaacgttcctgtggctctcaaggcggtcagtcggtctagcgcccatcctaacacgttgtctcgccctgaaagggggataattctaacttggtacaaaggataattgaaagatgtttatgaatattcaagtctgccagatgatagaatggttcttgcacatgttgatccgaggatattggttgttactgtggtagtttctgaatctcaattgcctatatacaagcgacaatatatgccagctggagaaagaaaggggagaaaagaggaaaaccatgattatagtaagcaagccaagtatattcggaaaactctctaaagcatcactcaaaggcgtgaactgatagatagactgaagaccatagacaaagcgggaactacaagacgttgcatagacaagatccaacattggcagctcctaccctgaccataaaaagtgttagaactctctctcgattggtacgtgtcttcagggtccttttgtatacttccgataccgacgtgatcttgaaagaaatacaacgtaaggtcctgtagcgtctgctggcagcagaatatataaacgttcgaactggtctttcccctgtaacgtctatgcctgcggattatgtgtattaccctgaaatctacaatcaaagccctacgacagctcagttctagtcatctgcttggcatttacttggttgcctggccttccgggtcttgatcaactcatgcagctagttcatactgtacggtaagaaatcatggaatgagaggaagtgtatacatgtattgtattcgccatttgcggagtgtaagagaagattaaatctagtcatattgcttcggtggtaagttgtccgcgtagttacagggactggtacgctgacttctgcgtcaggggcagtgagaccgtcgccgcctatattccaatgatacattttcagttgaggcgtgaggtatttcagagagaaccagaatacaaaatccgagaaagatattgagaaacagcgtatggcttcacggccttggggctatgcaagcccggcgcccaagacattgattcaatgtccgactatgagacaacacacttggagagtcgacttagttacttacaaattgtacactttataagatccaaggagacagcgttagaaagtaataacaatggcatacgtatgtagaaaccctaaaggtggatggaacgaggggaaatttcatcctgcttcagggatattaaagatatatcgaacaacaaagccagaaaatcattggcagcaaaacgtatgttcccttctatttgcaagaagcccgatacacgcatgaaaaccgaacctccagactcgcgttggtccccaagccaacccgtagaagtgaaacaaccaagagtccgaagaccggtcaaataacatggctaatctagtactcgggctccaactcctcatcaccctcgatggagtcggaggcgacctcctcgtaatcacgctcgagagcagcgagatcctcacgagcctcagagaactcaccctcctccataccctcaccaacgtaccagtgaacgaaggcacgcttggagtacatgagatcgaacttgtggtcgagagcggaccaggcctcggcaatggcggtagtgttggacagcatgcagctatattataattagcaccaaatttttaatcaggtttcaagacccgaaagaatcaagaagaaaacttacacagcacggctgaggttagcaagatcgccgttggggacctgcatgggaggctggtagcagataccgagcttgaagccagtagggcaccagtcgacgaattgaatggtgcgcttggtcttgagagtggcgacggcactgtgggcgtccttggggacaacatcaccacggtaaagcagacaggtagccatgtacttgccgttgcgggggtcacacttgaccatctggttgttgggctcgaagcagttggaggtgatctcggtgacagagtgagcctcgtgggcggccttgtcggaggagatgatgggagagtaggcgaccagagggaagtggatacgggggtaaggcaccaagttggtctggaactcgttcaagtcgacgttgagggaaccgtcgaagcgcagggaagcagtgatagaggaaacaacctgagcgataaggcggttcaggttctcgtagctggggcgctcgatgccgaggttgcggcggcagatgtcgtagatagcctcgttgtcgaccatgaaggagcagtcggaatgctccagggtggtgtgagtagtgaggatggagttgtagggctcaacaacggcagtggcgttctggggagcagggtagacacagaactccagcttggacttcttgccgtagtcgacggacagacgctccatcaggagagcaccgaaaccggagccggtaccaccaccgaaggagtggaagaccaagaaaccttggagaccagcacaagcgtcggcaacacgacgcacacggtcgagaacctcatcaatcatctccttacccacggtgtagtgaccacgggcgtagttgttggaagcatcctccttaccagtgatcatctgttcggggtggaagagcgaacggtaggtaccggtacggacctcatccacgacattgggctcgagatcggcgtagatggtacggggaacgtacttgccctgacctgtgaagcgggggagaaagaatgttaggaagctgtgctttgcaattttgcatatcaaggcgggggaacattgaaaaaatcagggttttcctaccagtctcggagaagaaagtgctaaatccgtggtcggggtcggccttcttgcgctcctcagtgaggaatccatcgggctattatccatgttagtcacgggtgtttacctctcggcaagaaaatagggggtacgggtgcccgagtcaagattgggcgccagcacgagtttggaattccaacgcacctggataccgtgctccagacagtacagctaaaaaatcaatgctgttagtttaccgaatacttgttcctcgatgggttgtggatagttacctcccagcaggagttggcgatctggcaaccggcttggccgactgtagagaagggtcagcgcattcatcgaagaagatatatcaagtctgccgagtagactcgatggacgacgtcgacataccgttcaaactgataatctctctcattgtgatcgagtcgatgttttttcaggctaaaaaatcagggaggggaaaatgaaacccaaacaacaaacgcgacggtctggaactctcagttaggctcgaatacgaagatgcacaatggaagggggcggggttgggcttcgtacctgaagaatggaggaatggacgagaagatggaaaggaaaacaaagttgaccagaaatgttgtggaggaggaggcgtctgtgctgtacagggggaagttcgttgttgatccgttcgttgggtcgcgtccggcaatttgattggctcctccccggtgaggagtagcggctactgaccgcctcgtagtgatctcgtgatgccacgtgatatcattagtaccttgtgacatgtggatattaaaaaaagaatacaattcaagcttgaatagttaagataattcggcgctcgaagtttgccaaatttgtccagtgaagtgcccagggcaactcatcaagggtgtgtggtctgacgctgttggagctatcgatttaggatccactagggggaaccacctcgaaccaccattcgaccatcatagccaaagtactaagacacacacctcggtacagtatatacattccaacattgcacattcaacttttgaatgctaattgaactcttagcactacaattgtcaaaaactgcccgagtctcgtcatgggccgagaataagacatcactaaaacatcatctcgttcaccaaaaaactccctatattacaaagcagaacatcaagtctctcatcatgcatataaaactcattcccaccctgggactcatgctcccgctcttcacagcagtggcgcaagcaaacgtggaaaagaccatctttctagcaccaataccagcaatcgtcccttccgagcagccagacctcgacgacctaggtctagagcgtctatcaccacagaaacccgtggtgcgaacccagttaaatgcctcattcccaacggctgcggccccctatggtatagactcgtggttcttccttgaaaacctgaacccgggccagcggtatgaagtacgagtgtgctggctagcgacagtaagacaacccactaatcctccctctcgatcgtcatcttttacgcatgtaatacacatcaccgtatataaacacaactaacaaccccctagcaaccaacaacattcaccctcaccacctacccgctctcaaaaacaatcgaagacaaaaacctcctgtcttccctgagcatgtacacagcagcccgactcgcagcagcagacacaatccaagaaaatgtcatcccgcacagtgccaacgcacgcggtggcaaagatgtgctcgaccctgtgccgacgagtgactcggttttgtttctgcatgtgcacgccgcggcagattacttcagtacagatcaggcattgatgcagaatgtcccacccgtggcggtggatttgattcttgatccattcttgtttaatgttttcccgcgctcgctggtgccgactgctgggtggattgtacttgttgctgttctcgcggcagtgctggggaggtggattgtgaaggaggttgggagggctgtggatgatgctaggaggcaaagtgttttggaagagatgaagaagaaatgaggttgtggttttccaaggttgtgtgtgttttggagatgtacgattgaactatttaaccgagcaaagaaaacaactgaaatatatttctttgttcctctgttggaacctaacgtggtcttttggcgactacctcactgttctgggaatacttcatggcgtccacgggaatgttaggtaattaactatgacaacgaaggttattaatgatgtccaccgacgaggaatgagtgggagccgagttatgcagagaatacccaatatcatctaagtaaaaatcttataaaagtactatcatggactctacattatcattagttacaagggcaagatttcgtagccagagtaaaactatagacaaggccaaatgacatagacgtgaaaggcaaaatccagataacataacagaacaattaaatgtcgaggtcgcaaagtcagatacatagggaggtgtgcttggatacaggatgagcaagggcaatggggaattcaaagggaaaagccaaagatataagcactgtatatgaggcgcaacagggacaagggtaaagcaaaaaaaaaaaaaaataccaaaagttcacgcagcaggaaccaacgtatagggccaatcaactctcccccgtttctttcctctctatatgcgtctccaagaaacctgattggcatttatgccagtctattcaagataagcccacgctcatctagatcaaaggacaagatcacaaactcccgttaaatcgtagctccatgaatggctcagccattgatacaaataacgtagcttaatcttaagcttagtcttcgaagaagttgaggatcgcgcggatacccctagagcccaggccgtgggacgggtaggaaatgtagagcggatcctcggtggcgccgagcttagcacggaattcactcttgcgcacaagatggaactgtttagcgagggcttcgtaggtgtgctccaacatcttgaccttggttccctgcaagttgtgacctgcggtgaactgggcagtggcgccagcgccaaatgtaaggcctttgacgccactcttagcggcggtctggattgcatgcgtgacaatatattcgatagtaccgctcggcgcgccggggaaatcgagactgtacttgacttgcataccatgggcaggagatagcattgccaaagcgacgaaggcgcagacgacgccattcctgtccagagcgtagaagtaccaacggtgctcgaagtcgcaccatgggcgaatctgggacaggtgcacttgcgcgcccttgcggttggacagccactcggtgatacggtcgtcaatcttcttgcgaatatcgtctggaaccatctcgccttggttcatagtaactagcttaacgttctcggtctcggcgcgacgcagcttacgtgcaatctcgccgtcagaagcggctaggttgcgcgatgggtcaatgcgctcttcggcgatacaagacaaactgcgccagcctagtcgttcgccaagaatagtctcgacttcaggcgagcagaggatccacacgggcttatacttggtttcgcggcgtagccactgcaagaattgtgtaattgtgcgtgtgtactgcttgggatcacaggctgggttaccgggaatgatcgcataattggaggagctgggcacgtaggcgacagctgcaccagtagtcatgtcacgccagatcttgaagcgttcatcaaaccaggaggttgatgtggcatcgccgtagttagcgaccagatgttccagaggctgcagctcactgacgtccgaagctgtccgagccttgtgctcatggtgccacggcggttcgatggtcgatgattctgggtggcggaggttttcagagacaggctttgctggcaaactcttggggtcgcgagggaacattgacgtcagtcggatgttgcccagcttgaggataagcatcatgatacgttccagaccaactccggcgcccgcgtggggtggtgcaccccagcggaagccctcgagatagtcttccatatcatccgggttaatgcccacacgacgcatgttttcctccagcatgtggggatcgtggatacgttgaccacccgagacaatctcttgcccacgaatgaacatgtcaaatgagttcgtgaagttgtcgtcatcaacgtcgggcatcgtgtagaagggacgtgcaccacgagggaatttgtcgaggacgtagtaatcagtgccgtacttctccttgacaagctcacccaagtgaatctcatcacgggtacccaagtcctcgtcaaaaggtagcggattgccctcttcgttcaaccagcccgagtcgttcaacatcttgataccatcggtaaaacgaatgatcggcgtcttttccagccatacgacatcttcggaggggaactggtacttgatgagatcaatttcgcggcggtgtttggtgtagatgcccgtgaggatattcttaatcacagcatcaagtgtctcaagcatctcatggtagtgctcatcaatagccatctcaagatccaatccagtatattctgtaagatgacggtgggtattggagttttcggcacggaacacagcaccaatctcgtagacgcggccgaaatcagaagcgatagccatctgcttcgccaattgaggagactgagcgaggaacgcagggcgaccgaaatagttgacttcgaagacactcgatccagactcggtagcagcgccttgcaatttcggggtatggatttcgataaagccgcggtcgtcaagggaagtacggaaaagattgcatgtcacggactgaagacggaagatggattgcgaggttgatgtgcgaaggtcgagaatccggttggccaaacgtgtccggtcagggatgtggttgcggcggccctcgatcttttcttcttcggtggtccgaatctctgcctcgtaaacactgaaggggacaggctcctcgcggcgaacttggaggtgaaccgaatcaatggccagctcgacatcatgaactgagcagcccaacactggaacctccggtttctgaacagtgccgcggactgtcacaaaagagcccacccggaggtgctccacccactggaccatggcgagagagattgctccctcccgctcatgcaaaacaccttggaaggtacctagctgttgacggaataccaggaacaccagtttggcactcattcgacggatgacgtgcagtcgtgcgctgaagaacactttctgtccctccatggcaagacttatgtcatcgagccgagtccgcacttctcgtgttcgaacggacgactgcattaaaggaagctcgccataacgcgctttcatttctggcgtctcctcggctgtggatttggcaatttcctcttccttgcggcgatggtcggtctcggagaacatttcctcgctgagacgactgcgctcgctgcgacggtgctgacgcaccaaccgcttctgttggtttttgctcaaggcaccggtagaagagtcgtcggagacatcatcagacgaagagatatactcattcttatcacggaggaagttgccaatgatgctgcgacgaggggatgcggtaggagaaccggaccgatctgtcgaggtacgaacttttgatggcagagcagagcgaacgttggaaccggaggagtcatcctcatttcccaagtgtcccctaatggccttggagagggcacgtttaatcgacataatgtgcttaagtttatgaagggagggggagaagaaaaaagagaaagaggagggacctcgggactttgtatatatatgggaaaggtgggggggggggctgcgccggaacgggcgatttcaaatatttcaactctgggaaggcctagagggtaaagagtccgatagcaaaacaggcaacgcgcacgtgaattagaacaaattgagccaaatacaatgacagaccaagagtttaaagaagtagagtcaatcaaaacacacacgtaaatttccaaacttataaatcctgcacacggccacagggctggaaaagatgtgatgacatcatccgaaaccaaggaatccagattttcttggtatggggcctggtggtccctggggagaactggccattgcttcgaacttacgactttgtttccctattactccaacggtttctctctcgttattgttatttccctcgttagtatcagttggctgttttgttcttcgttcctcggccaatgtcagatatctcgtctggtcttcccgtctgtccgtcttatcttcttatcaccgccggcttccgggcccctccgatgcgtatgccagatcagtagatcgaatccgttacttttcactacagcatcatggcttcgtctcgttggtggctgtatgtacaggccatattttggcggtttctgatgcgcattggcatgttcttgcacgagattggtccgcgcccaccccgaccgttattcacccgtaccgtgatatccgactcccattgccatccggtcgtcctccacttttactgtccaccggattatccagagcagcgaaggctaggccatcgcttccccgtcgctgtgaacttccacggaggcggtttcacgctcggtgctgctaccgatgattctcgctgggcgaaaatggtgctggaggataccggcgccgtgatggtgagtgtcggctaccggcgagcccccgaacacccttttcctgcggcagtagacgacggagtcgaggccctactgtacctggcaacacatgccagtgaactgggattggatgtgagccgagtggcgttgagcgggttctcggcaggcggcaacctggctgtcacggtgcccttgcgactgcgtggcagaatatccaccgaagtgaaggagcatttgggtcgagccgaatccacgcaaaatctgctcagtcaggtcggcgatcttcacatcgttgcattgttctcttggtatccgattctggactttgaagaatctcgcgatcaccgtcgcgctatgagtctgatgccggacaagactctccctgcatttttcaccacactctttgatgaggcctatcttcctgatttggacgaacgtatatccccctatgcatctcccatccacgcatctgaccgtatcctgtctgaagctcttccccgcgacgtctttttctttatttgcgagtgggatatgttgatgaaggagggtcaatctttcgttcgccgattagagagcctcggtaaacgtcctcgcgccatgcttattgagaaagcccgacatgcgtgggataagtcacctaatccgtggcgggaccaaaatcgcgtggaccttttataccgcgatgcctgtgcggatatgaaggctatctttgaccggtgatcgatttgcttgactatcaatcttcccatgttttcttctcttagcactgcgggcttgaccttggcgtttgaaccattcatggtgtcgactttacatagcgtttttgatatgtttatcctactataactttattatcctagtctacaacgtacataaagtgtacctgtagctgacttatccaattgcattcgatcgcattggctgggatcatgtatccacctcagtggcaactttaaaaccaagcggagatggaaacatacaacgcctatatgctaacaaaaggacggcctacatatgtacgatgtgccaaataatatcactcggaacctcctcctttccattgtagtgcctcatctcatgccactttttgaccacaggtaaagacactacctcaatgcttatgtataccctccgccacttcttggtcactgacaggcatgaaaacacctggtaccagcaatactcatatttgcgccagcaaagctgcacaccgctgagcagagttttccgtgcctacaaaagacacgctgggacgattatcgagaccgatttcaacaagtgtcgaagctaataatgttaaggaacaaatcatctcgatcgaagcagtgtggactcaccgtcaggatcataactgggccatcccagggctttcagtccgtgttcgggatcagcgatgaatgatccccaggcggatcgcatctgaacctgcagctggcgctgcgcatcagactcagcaatcccagtaatttcagcagattctccaaaaatcatgttaaattcgacaccatggtatgctccactggtagggtaaagacgggtattctcccagtccgcgttgtattgaaagcgccaaaccggtgtatgtcgacgacttcggtgtgcggcttcgagattggatgggcagaagaatgtctgcatgttgaaatcatcccactgttcgtctgtcagtgtcgatccctgggcgtaggtcgcgatcttgtagaatcccgcttcattggcgttgtgcccgaccaagtagggctgttggagaatatggttagtagctacattgacccatcgactatatttgagatgtaggagagcccactcacgatgcgggcgaattttccttgctgcgaaagaagagtgtaattctcaaaaacagtcacgtcgtccacggtgggctggaaagccggggatttccttgcagggtttgtagtcggaaccttcactgcactagcagcggcgagaatggcactcgcattctgctttctcatgcacggcaaaacatcccctgaagacccacagcctaactgggcagacacagtataccaatgctccgctgcagttgtcctattgtttgttgggaagctgagagctgtgccggaatgcgagatcaaaccggtaactaggggttcggactggtaggcgtacgcccaataatcaacagaagcacttccgcaagactggccagatatagtgatgcggttaggatcacccccgaatccacgaatattttgcttcacccattcaacggctaaacgttggtctagtagaccaagattaggagggtgtccaggcaggccaggaaacccgaatatgttcatgcggtagttgaccgtcacaacgattacatcctcagtaccagcaaatccgcctccataataaaaaggagtatcagtcgtgccacttgtccatcctataacatggatcagaaacaagacattggaaaataagtagcaaaaacttactaccaccgtaaaaatgaacatagacgggcttgagttgatttgagtctggctttgaccaaatattcagagtcaagcagtcttcactttgagtgttgttatttatagccgcgaaggcctcgaagatgctgtcaaattgcggagttttgtcgggatagtcgaccagcttcgacaccgagtacatgcagtctctgtagattgctgttaaagaaagtagaatacaatcaccgcaaatagcactcactttccctatgttacgttcatgtcagacattcatacattttatgcacttcgggtgtaagggataagttgagaccatacatattctgaggcgacatgaacacccctcggcgtgtaaggttggggcggtgcgaatcgcaattgctcgacaggcggctgcgcgtaaggaactccgagccattccgtgacccctggattctttgatgcctcatggccctgaatgattccattagacccgacatgggcctgtcgcgctacggcaaccactgcaaaggccagccatattactcgcatgatcaaatatatccctgattgagtcggaggggcaaaatcgagggaaaatagactgtgagagaaaccgcgtgttgaaaatcaattgacgcatttaatatatcgtcaatatggctaagtggggcttgcatatatatggagcctgtagaggtaagccctagtcgatctggcgtgctttgattcgggttcgctgtctcaagtctccatttggcccccaatgagccgtcccaggtcatatctaatgcctgctcgcggaacaccggaagccttgatctttgatctcacgagagacagctctctctcctcgctttgtactcatgaaatgcacattggctatagcctatgatcgttccgatctaatccaaccccatttggcttgacaatgttatccagagtatgacattttatggccaaacaactgacggtgtcccagataggggccatgtgcttttcattaccgcgcttgtgatggtgctcactgcggccatatttgttaccattcggctagcaacgaggattcatctgaaaaaattcggttgggatgatctgttcctcgtcatcgccctagcggcatcggtcatgacaacaattgctgtcaatttaggtaagtcaaaagacatctgatggcgggtcttttagtcacaagctgacctttggtttccagccgtcgtgcatggttatggcaggcgaaaagcagatatgggagagggtatacatatagctctgaaggtgcagtgatatcaacggtagctaatgctcgttcaaatctctaacactcccccaagtggttttttgttgcccagattccatataagattgccctcggctttaccaaagcttctatcgtcctcctttacctccgagtatttatcacagagtctttccagcgcgtgggaaagggtttcctaaccgtcatcgccgcatggacagtcgcatcagtcctcgtcacaatctttcagtgtatcccaattgaagcttcttggaaccataatatcaaagtcaaacaatgcgtggacaaagatagctggtggtatgcatttgcgggaattaacacggttactgacgttctgatcgccattctccccattcccccagttcgccacctgaagctctcgaagcgcgaccggattgggttgtgttttgttttcggtgttggagcattgtatgtatcatttcatcctctcttctctatgcattaatcaggagtctcatgtgtacacagtgtctgcgtcactagtatcatgcgtacggttgcagtgtctcaaacatcgactggcttagatcaaagctgtgagtatcttgggagcctcgaaaaaagggaatgcagagaacagttgctgatcaaaatttactataggggattttatccctcgctcagtctggactctcgtggagtgcaacatgggaataatctgtgcgtgtctccctatgatgcgccggccgctaagttttctgtttccgtggcttttcagaggctcttctcggaatgaatcagaaagacttagctatgttcccattgagttgaggtatacaaatcgccaactgcgtccgcgagggagtcaaagccaggaggaaattctacagtcagatgtgcgagataaaagggctttggcggctgaggaataagataatcccatctgtgctacgacggagattcctgtcggtttttcattgcttgcgggttccaaactgcgtacaacacctttagattagagaaagaatcatccaaacggacaaaatatgtatgttaacgatcctcaatatctgcatgtcgtttattcactagtctttttgatactactggtgagcgccatagtcagattcgcaaacaaacagttatggcactgggagttatttccatttaaaaaagaggcgttggttggtttatgataacgcgattatagagaaatttctcatttgaactactattacagattctgcgagcttgtcaattggaaaatggaatatttgcattaatgtagtgctgaattttgcagaggcagtgtttcgctgcgatgagtaattccgctagaggtcttcaagaggctctgagtggccacacaaggatagtcatatcgtgttactatgacaagccaagcaaacgagtatttacacaccaggaaatcttcctggttaaagtgcccaccgaatgaggtatttggtggatgaatgttgaatgtaacaaatcgagagtagtggtttgtaagtttttgaacaaacaactcaaaattcgtccctcaagcctgtctcctgctcctcgctcaaccgtttctcattcaatgttttccaccatgcgtgcgatgggtcttggctcggtccagtttcatcccatggcttcgggctgaggatgtaatgtacatttttcacattctcatcgcgccatatagcgtcatgtacaccttcccaccgcaaggttttgagtgcgttgtatatgtacgggagtgcaacccagcgaccataaaacaggtcaccgagaagggactgatcggcaaaatcataattcgatgttgtagaagcaccaagctgtgcaagaatcttctcgtaggttgcctgagctgggatcaccacctgaaggcctccattgggtatccccaaccctgaagtgggtgaagcaccggcgatttgcgcgatgtcgggattttcatgctgcgtagtatatgcgcaattggccggaatcctttcagaattatcgaattagctgcactgtatgtcgcgcttgtatattcccaaataaaggttgctcttaccagtctgcgggatagtgaggtttatgaagcggattgcagctgcaagcatggctagcggcaaagactcgatctccgtttccagccatttctggtgaatccaattcgacatccattaattcatccatatttttaaggactagcatgtcactgtcaagttgtacgacacgctcatattcaacaagtgagaacggtgtgagtttgctccaacaatcgtagaatcgtacatcgttggtgaaatccttgggagctgacggcaggagatacggcacatggcgcttcaagattttccgggaatcaagggctttgtggccttcggcagggaatgtgtccgtatagagcacgacaagcggatactttgacccgacctttctgagagagtactcaagggtcaaaagcccagagaggtatgcagtatttgttatgagggtggtccacactgagaattgttatcatccggagaaagaaagtattgtagagtttcagattgccctgtcgatctgtaccttttgaggcatgtggctggaggatattctcatccatgatttgattgtggcgctgaaattgcttttttttagctctgactgtgattgattaggtgagaagtcagcactcacatttagcaattgtaacgattggaattggctgttgcactaagtacaatgcagatacagggagttagtggagtgacaagggagcgcgcattgtgggtgaggggttcccgaggtcccttcctccggtatcggtctacccaatgaggggttaagggttagttgtggtgtgcatgcaattagttagcatatccaatgaatgaaggccacgttcggctggataacactagactggaaagaatttattagcgaagcactattattcgtcggatttacaatcagagttctttaggctaattagagtagtcccgtggcttgacctagtttctatttggttcataactacggagtatgtaacccgtattgatatttatgctcttggtgagctgcataactatcgatgtattaacctacgtttattttctatgtacttcttcggttgaaactatgtggtcttactccgaatgacaatgcctcaaagatacaagcgtgcatgtaacgagccgaaacacagatattttagggcttggttgcttaaccgccgacgctaggctcaatgcaaatcgatgtgcatcgatatagagtgattggacatctccgggcgcatacttgcattagttagatatggccaacacataatagtaggttaaatttaggcatcctactttacttattacaatattaaggaactatcgagaagcagaaagccgagtgctgcattatatctattcataccggcccaagacagcaacaattggatttgcgcttcgaattgtgtattacatccatccctagcatatttcaagttgattagccaaaatcaccattgaagtttcctcaaattttgctacatggctttctttagctgtgacactcgtcggtcttggtcctatcgctactcggttcggcaccattgtcgaccggacagatcaattccatgacctacgagacatgctgcctttaggcagccggtggcgccgacaaccatatataccatggtaccatattgtcaaacccccccccctgttgggcccttatgagcgcaaacctcttgcatgggctctgcgggaacaatatggtatatgtcagtggttcaccatcatcatcacaccaagttggccaagcagcatggtcggtgttatttgcagttattcaccgaggctctcatatcaataaataacacaaattatcagagaagctctcaacacatgataccatgggatttgaccatatagtcacaattaccaacgaatcttaccagatcccaccaagtgaaagctgggctgatatgcctcttcgtcctcttacgagacaaaaattgactacttgtactgtgatttcacgtacaacactcatggcattgttctgtaataacaaatgcgcggcgggtattttgttatagcagcgcttctggtcatcgagctgcctatgcatcctactgcggacaatggcgcgtggaatggcccattggagaccttgcacgggttcacttttgtgcgtatgacctgcacacgttatcaaaggacccatatccggcaagattccagcaaagagtcgataagtgcttacagatactggctggggtgattgaatcgcactcatcaaatacattgaagtgtgcttttccggcacgcaaatcagccggtaaatggattcttgaatatacacctaaaggattcggcggtgcgcatggcggaagacatctttacaacatgctcggcggcaaagtgagcgaggtcgacttcttgcccatgaaagtgatacacacagaaatagaagcatcaaaggacatggtggttcttcacttgcctagcaaagattccgatgtgcgtgatgtgattttatacgtctcaaggcaagaatcggccattttcaatgaagccgtggataaacttccttggacatttctgtcatggtcaattcatcgagggctgtgtgatatcctagttgcttttgcaagggaaaggatggaccactatagaaaccgtttagcagagacattctgtcttgcggtagcaaaatggccagaaagattggaagccaggggatgggacccgcggtttgtgagagaagatattgcagccatggcagcaagccctgttacgggcaagccctgttacggcgggccaggggaattcaggagatgtcgtcaggattgtgactgaaatagcagcgactttatctggtggaccaatttcagcacttgatgagacgaggttttggagggacgcaggtcccacatctgattctccaatccttgacccgatgaccgtcatcgctcttgtcaagtgtttcgtcttagagtggagtgtgaacttgaactaccagatgtaccacgattttcctctagagatgtacctaggatgaacaaataagaactgttcgaaaacttaacattttgttaagtgactcattgaacagtgccttcgtcctcggtcattccgcacaacgatcccactttactcttcactaatgctagcatgagccattacaagtacatcttccttggtactgtcaatccgcatacagactttgcccatttgaagcgcgctaccaattcccaaaaatgcattcgtgcgggtggaaagcacaacgacctcgacgacgtgggaaaggataactatcaccacaccttctttgaaatgctaggtaactggtccttcggtgactacttcaaacaggaagccgctgagtactcgtgggagctgctcacacgcgtgtttggtcttgaccccagcagactctgtatcacctatttcgaaggttacgcccccctagggcttggcccggacattgatgctcaagagatctggcgtgctattggcggacccgatgaccatatcatcctaggaaacatgaaagataatttctgggagatgggcagccagggaccgtgtggaccctgcagtgaggtccactatgatagagttggtggatgaaatgccgcttatctggtcaaccaagatgaccccgacgtcgtgaagatctggaatattgttttcattcaattcaacagggaggcagacatgtctttgagatcattaccgaacaagcatatcgacaccgggttgggcttcgagcgcctggtctccatcgtacaagacaagtcatcgaattatgacacagacctcttctcccctctctttgaaaagatacaagaaatcacaggagcttgtccataccaaggaaaatttggcaccgaagatgatggcattgacaccgcctaccgtgttgtggccgaccatgtccgcacatgcacggttacgttgtacggagaatcttacgacgtggtgtgcgatacgcgaaagtcggttctttcttctcgaagattgtgcttacagttgtcgaacagatcggggatatcttccctgaagtcagaaggaatgaacagaccgtgaaggagatcctcgactaagaggaagaagcttttgctttaactctagaccgaggagaagcgacgtttggcaaatatgcgcagaagtgtcatgagagtggttcaaaggacctccccggagcttacgtgtggctactatatcacacatatgggttcccggttgacttgacaaagcttatggccgaagagtaaggtctgaatattgacgaggacgaagtgtccgccgcccaagagatggcccgagaggttagcaaaggcgaaaagaagagtgcatctgatctcgtcacgctcgacattcacgatctcgctgctctagagtataaagttggcatgtgtaaaccagatgatgtggctaagtataggaaaggttccatcagcaatctcaattttggacaagaaactgttcgcaaggcgactcgaaggaagcatcaaagagatgatgaaagagcaaaaagaaacgcagagaagtcaagtcgatgctgccatcaaccatgtcaaaaccgtcatcgatgataacccagccagcacctcgtttgttgttaacctcccgactgattgttccgccaaagttatcacggaggccattaagcatgtctcttctatccacgacgacaagagcgtgtatttcataggtgtaggtgccactggcagggttgcccaggggtgctttgtctcaccggtaagtttgtttcaaggaatagaatgagctgttttaacctatattactagaaacacacctcgaataggctggtggcaaatgaatgggctgcacaggttgcgaaagtcgtgggtggaaagggtcttacaagtatggggagcggaccggataaggccaaagtggaggatgggatggtggctgcgagaatgtatctccaagaactgcggatttgatcatctgagaagatccggaatagaatgcatacactgtggattgaaggagaaacaatccggccatatccaaggcagataactcgaaacctacacaaatcagcctcaagagttacaagtggagattaattgtgccaaccagccaatagaaaggaccaatttcaaatttccaagtgattcagtcgcttaatcgggactttaagggtcctaatgaaatgaggtctcacttaaaaatagggtcctaaaaaagtcagggggagaagaatatcgtgatggacatctcaatctctcagcatcaccctaaccaatcccacggcatttcccggattgatagagtggtgtattattccctctctggaacccatttctacttctacaccgtcacaccgtcaccatgcgtgctcaggggcggacattcacaaaattctcaaccgcaagcatactgatcctatcatgtctcttcttcatcctctattaccaccccctgagagaagcaacaccagaaagctaccctacatatgatccatctagaaagggattccagctggcgtcgccgcggatcccagagaagatctggtacaaagttggacctaaaggattgagcgaccagtcagaggaatggctgcacgattgtctccacaaaaacccagcgcatagcgcgcagatcatgaccgacctcacgggcgatcaatatgtgcaagagaacttcggcgatcgtcccgatatcgtcgatgcctacctttctctctcggtaccgattctgaaggcggatttcctgcgctatctgcttctcttcgtcgaagggggcatctgggctgatctggatgtctcgtgtggggatgtacccattagggaatggatccccgagactatgcgtgctaaagctcggctggttgttgggtgggagtttgatgtgggctggggggagaatttcatccggcagtttgagagttggacgattatggcggcgcctggatcgccgcatctgttcatggttatcaatgatattatggagggcattcgtcagaagacggaggagtatcaggttccggtttccgggttgactttggatatgacgggtaatgtgatcgactttaccgggccgaggcgactgactcgcggggttttgaagagcttggaattggctcgcaatgagacgatcgatatggcgagtatctcgaatcttttggagcccgttttgctcgatgatgttttgatcttgccggggtattcgttcgctgcgtcgtcgaattcttacagcaatgtgaatgtgactggtccttcattggtccagcatcattatgccggcagttggaagaatcacaatggtggtgagatctgaccatggatatgacttcatgtacattggattttgtatagagccatgtgatttataaggcagttgggtcttagaccgttagaagagttcacgaaatttcatgtaattattttcccattttttgaacagctagatttatcagcactatggtagtacacgaggcacagatttcccaggattccaccggacagttccgtgaagaagaacgatatcgtcagtcataaggtatcgggaactttttgtgagaaaaaaaaaaaagttgaagagaaaagatcaaatcgcaaatattggtggaaatcccggacgccacgctgaagtaacaaaaaatcgaacgaaacatggagtcctgattcgaggaagatagatagtgtcaaattcactcctcgtcggtctcggtggcatcctcgccgtcttcatcatcggactcgtcaactccgctgtctgactcgtttcccccgtcgagacctggaataccgcgccactcgacgtagtcaccttccaaccagcgacggctacggggaagctggtagggatcgaaggggaagtatgcatccagttgatagccgagatgatcgccggcgcggatctcgcggccgacatggttgaagcgaggatctgagagattggaaatgctcctgaaggcagtaacgcgaatgcgcttgttggtctcaaggagagggtagacgtataggaattggaagtggtgggcgatacgggcgaattcggcgacgatggccggcgagcataccttgagcgggttcaatcgcgaatagatgcatttgtgaaggaattctttgatgttgggaggaaatgcgatctggcccggctcaagctcgtccacctgagccgcagtatcaccatcgacggcagcggtagtcagatcgcgccaccggaaacagaaaatgtacagcagagcctgggcggtggagtagaaaggtccgtagcgacgaagatcgggcccgcggcagctgtcctcatagtccatacgtaggctgttgaggtgtgtgaggaggagatcgaagacgtcgcgaacaacttctcccgagatatgggcaccacgggcaacaaagctggccagatatgcggctgctgactggcgcaggatattgggctgcagcttgttgaagatgagctgtacaaatgtggctgcgaagcgatccacgagcacgggcgaagcctgggagaaatggaacaagaggaattgcgagtgacgggatcggtatgtagggaggatgatcgtctggaagtgactgaggagcaggtctagcgcattctccttatcatccagggtgcccgaggtgaacgggggtgagaagtattcgaagaggatgtcaatcatcccgtccactttgagaatgttatccttgatcttcttaggcccctttatgtcgtcctcttccgaatcttcgctggaaaccgaggcatcatcatcgtcatccgaatcatcaatctcatgcaaaaattcatcgccgacttcctcttcaaagtcctccatatcaacctgaatttcaacgtcgaccttgacaagcttctcggtaataagcgccaggatgtcggactgaagctctggggcgtaagtaatgatgtggatgagattgcgggtataggcaatgttcgcgctagctgggtctgtgtcgaagggaaactgggcagacaaaatcggggagagtgacccactaccggccgggatgagccgcagcacatggcgcattgccatgtggactcgagtatgcatttcggatggtgtcacgacagcgtagccagggagtcgaccgcgtcttcgagggatggacccgagatttgtggctaacatcttcaagacgggaccaaggaaggtaccctgtgcggcggcaaggttgcccaggaaccggatatacagcttcacgtaggattcgtcccgtccgagccactcgctgttgatgatggcatggaccagtccgctgcaggagcggtccaaggaggcaacatgcgagatcagaccaagaaggtggtttttcaaagatgtgtgtgttggtgattcatatgcaagcaggctgtcatcgtcttgctttgttggatcggcagaaaacattcccttgattcggtcgtagccctcgctttctgacatcgtaacatgtcggtggatagcccggcgcatctcctctcgaatgaatgtcagactcttctccgacgatgtatcctcatatatcttcacatcttgatcgaactgtacgcggggtcgcttcttggtaggaggaagggcttctgtcgcgtcatcggcctgggatgaggacggggatagggggaggtccatctcgctaattttgcgtttcgagccggcgaccacaggaggagccttcgagtttttgagaatcgggactggagaagaagccggaagcattttagatcgagatatcgtgggtgtggccagtagcgccggtttgcgtgaagtcgtggctagggagaccatggccgaaggtgcggaagaagagatgtaggacaggttctaggcagaaaccggtgtcgacatttgcttttctgcactctggcagaaatcgaatccagttgactttcaattcaacggagcttatcgaagactgatccaagcacacgacacttttcacgtcgagatcttgaggattatgctacagattggaataggagaaaaaggcaacagtctgtctgcatccgtgggagtccagttgtttgagatagataaaatcggatgcagacagaatggtcgagttgctggattccaagcaaagcaaagtgaaatttttccttttccttcggtcacttgtggagcccggcggacacccgtgaccgtgtcggtgagccctacgctatacctaattgggtaatattgacttatgtcatcatgtactcattgtcgggatgtagaactacatcgtcacatcttactttgttcgacttggaaggtagttttgaacgtgtttattggatcatatttgagattcggaacgagacatcacataagactcccaaaaagtccctgaaagaccgcagaaccatcatcaagtacggtatgaagcagttgaacccaaatgatacatcaatgcataacgataaaaagaccgtctaatacgggaagaagtaaaaaaatggcatgaatcaattcaaaaaatcaagattgagcgcaggaacacaaggtcctcccatggtatcgtgtaaaacaaggggcaatagtcgtaaaagaaagaataagagttggtcgtcttggcgggtcaagcgaaggaatatccagtcccttgcaagtccgcaatctcgtgtcgttgatcaccccggatcaaccgggggcgcagcaattacgttagaaccaagatgtggtcataggcccacgtgtgtcctcgaaaatgctgccgtacagttcttcaacttccacaagataatcttcgacggagaacttcttgagccccttggcatagaggatccgctcctcgtcatcgtgcatattaaggccacaaaaatcctctacgacctcgttcacctgctctagctctttgccgaatggatgcggctcggcctggaagaattcctgtgatgcacgaatggtcggtgtggtgcgcgctgcattcagcggcggcggggacatcctcgagactgagcgcttgtgagcgagctcctggtgtgaccgcttggtgtgggacagagctcgcttaggcaccatcggagcatctgtatttgacgaagacgtggaggagcgcgggtggcttgtcaccgaggccgtatgcttcgggaaatacgacgccaatgggtttgcatcaatgggagagctcccatgaggggagacatcgggcgaggacaccgaagacgcgtagctttgcggagaaaatgcgttgtcggagtcgtcgcgcgatcctagtgacgaggcagatgaagagccggcagagtaacctgggctgatatcgggtgcgttgtaggccagcatgttggtcgtagacaagagctgcaccggtccagatatgttgctgcgctttatacttgccgagttgagtcgcagattcccttcgccacgatacggcatgggtgcagacacctctgggcgcttattgcgccgggtgaatgctctcgtgagggttgacatgatttgtaaatttggtcaagtttaaaatatggcaacggtgcgtttcagcgtggttgtaaattgatttagaattttacacatgcaatgtgtgcgacttcgttcgtttttggagtctggtcgctctttgcgatcggatgcgttgagtctcgcgtggtgagacgatcgcggaaagaatgtcagatcaactggaatgtccagtatcagatcgaagtgtgtgtagaatttcgaattctagttcacagtagaaaatgaatgtcgggtcctcttgatttcgcacagcaaaatgtagagaataacagccttaaggaatgtgtttgaaataaaaaaatcaaaggagtccaggatctcagatcgctttgtatctaggacttaaagaataaaagaataaggagagaatgaaggaacaaggacacaatcccaaggaggttggaagaagaaagagagggggtttcctccttacgggggattatgggcgctacaccagcgtttgaccaaatttcacctggaccagtcgcaggacacccaaaggatgctgatggagcccaatcaaagagttcggtctagaatatttggcttctcagggcccagttgttcttgacgatcagactggttcatccagacttttgatcgtttgcctcattctacggtatacgaactacgcctaatattggttgaccttgaagggggcactccgtacaggtacttccgaacccccgagttggttccagccccatcttccagggctatcttccagggtcggatatgtgcctgggtatggagggcgtacgtgttcaacgtgttcgtgttcgacgtgtccacgggtcctgtgctggccctgagttgatatgaacaacctccctagagcatgacacatacagcgggatgcgacaatatcccgagaataatataattgaaacggatgcaggtccgaattcttagtctgaaggcacgggcgtttcaccaaccacttgtatcagttctatgctcaaagaagtctgtgctccgtgacccatttggcttgaatttggcccggtagacgtccaatcagaggggttggctggatgaactcaggtcaaggggtcttagtgcagcgcttgcctgcagctgaccgagtccggagggtttggagaacttccaaatcacagagatggtgtgctcgttctctaagtgactggtggatgtggagtattggtgtttaaagtccttcatctcagactccaccgtgaaaaatgtgtggagtggagtgagccccgctagggccttatcatgtcatatggtatgcgaggtactgcatgtcgtgtagtgctgtgaaccttggaattgcgccttgatcatgtattgctttcactcgacaaggccattctggtattttgcgtccttgaaaggttccaaacaacacgtgatgtggtgacacacaaccatagctccgcaatcgcttggcccgttacagataagccgctcaggctctataaggaaggagcagaagcttcaatagtattgtgttgcgtttagaacacatcaatttaaaagtaaagtctcgggttattgtgtgacagctcctccgctttgctcgaccctgcagatgcattggcatccaccgagatacccacagcatcctcgacgctagttattccgtctcgggaactacctggagatggcattattgattcaggccccaccgcgacttggtctccaaaatatgcctgcgaagctatcaccccagggtggggctgatgagcatcgtacgaactcaccgaactgaccctgttgtccttttgccatgcgtatgaaactagtccggaatgaggctgatctcccgagggctgtgatttatcatggctaggagtcataggaaccgcgtagccacgtcccggtgtgtctgaaacgacgtcacttgattgctcaatggtaaaacggtccgacatgaccgtcagccaacgctccatatcgggcgattctcggaggggaagctgagaccactctttcatgcgagctgccttgtgcttgagcaaagtatccgtctttggggtttgaatcactattggttgccccattgaacgcatggccatcaaagctccgtaaagggccgactcggtctctgccagcctctcttccaattggttcaagtatcccaacggtaagcccctgggccaatgagttagcttcccgggtacctgcatacatgtaggccgggtacttgccttttaccactctcagggtagatgcatttcgatacatctcctgcgcattgggaacagaacggacttaacgagatacaagtaattagaaatgagactggctagagaactaaacggtgagagctttggtcttacagtttgcggtcacactatatggtcagcacttatcttgctgtactttatgaataacatactttgcatttgcgctgtctgcatagctcacaggaaatcggattcaagttctcttctgatgagatctagagtcagtcgatctatgcttcttatctggggtattccggtcacacctggcatggtggcatcaggggccttccgcttcgatcgcaattgcgccatttgttaatcccgggattatgcaatgcccatgtagagcccccgaacatactaatgcaagatcaggctatcaaggtcgggtgtactccgtatgtatgttgctgttgggtgaaagtctcggagtaagaaacctccgggtaggattagcaggcacgtgatgatcaccatattcatcaggaagacaactaatacaacagttgttaaggggcgtgcggagcattgattttgcttctgttttgaatgaacgaattctatcatcgtgttgttcaaaatccctgcaaattggtcgtcataacgcatccgattgttggtcttattgacttgattattccatcccttccttttttattgcaatttattaccagccttccttcagtctcttggctacctaaatatggcttgatgcataatttttttctcattctgtctcacgataagcttagcttgctcaaatgcatacgcacaggcaagaattcttcgctaagcctgcgtccagtaagggtaatgccatatctattgccaataccagtaaacagatactcggtatgttaaaggcagcttacagaatattggtggctttcatgaccattcccttaaatttcctgacgatttcacgatcagcagagaacccaagtggtacctggatgccttgtagtcttccaaggtcaaggggaaggtccgtggaagaagttacgagaagaacatcacaactatagttttgtgaaagacgcgtgttgccatggcctaggtgctccattcgtgccttcaaggagaggaattcctcagatctagacgtcccttgtgcatcacgcgcatagtgcactcataattgagaatgtagctttaaattgttcgactcgtaggagtgagatagcactatctagggtgtatcctctgtgctcgataggggatggcgatgaagcagttaatataaaaaaaatattgttcaatcaatcttcaattcttcgattttatagatctggtgcagcccgctgctgacgtaataacgaactgggcgccagccctggagacttctcccaaaacttgacttcaatatctcatccaaaaaatgtgatacacaaactacagcaataatggcttcggcttcacctgcgagtatgagattcgaggacaatgaggctgaatggccatatttttctcgtgcaactaagagacacaagcgcacatcaggcgcgggtacctcagggccctcgcctcgcgagattggatttatgagagaatctcaaaatgacggatctgcgaccttccttggaagctcaagtggaatccattttatccgccatgtctacaatgccttcgcacgtcgttcagcggacttggaccaaacgcgagcccgtgacaaaacctcggtgccaggggaagacgaccggctacagcaaaatccaggaagcattcagagctcggatgagctgtgggcgatagaagaattaaattttgtgcccaatgcctcattttctttcgacgatcttgtcatgtggacacgcagctatttcgaaaattggcatccaatcttcccatgcctccacgccccgactgtcttgaaaactatagagacagtcagtcaaaaaggagcggagtcggtcaaccgattggaattgatgattctccgctccatcgtatccatttctctgggtgacaatcgacagagaacgtcgtctgaatcgaagcttagccccgttccttcggtcttggtctttcgatccattcaacatgtgatgcaagatgtacaaagcctccttgaagagccgactagcttgccactgctacaagctgcatttaccgctcaacttgcacttgcttctcttttgcgcctgaatgcggcctcgcgggtggggggtgtcatcacccgcactgcattccacctcgggttgcatcgttgcccaagacgcttttcttgctttaccagcgaagaagccgatattcgttgtcgattgttctggtccatctattcccttgaaagatatctttctcaggcccttggcattccgctctctattcgagatgacgacatcgacgtgtgctatcccgatgccgaaagacattcttcaacaactgtcaagctcccagatggccacagactgcggttgttgtgccatcttgcgagattcgcacggattcgaggtttgattgttgaacttcgtaataaatccattctccatagtcatgctagccaggtcgaagcggctcatgttactggagagctagcacaatggtggaatgaagtttatgatgatgtcaatcccatcaatgagcccgcagaatttggtctagagcaagagccgatcttgcagccatatcatcggctactcctgatgatcctaagacacgaagctgtcatttcgctgaaccgacctcttttagcctctgaaaagcccagtgcagattacaagaacgctttgcagacttgcattggatcctctcggtctatacttgcggcattgagaaagcacatgtcttttgaacccaaatctccgctctcgtggccatgctttacatggtcgacttggatggcctgtcttattctgatgtatgctgcgtgggaagaggaattatctacgccgactgctctcaaatatgcgagaatggggattgccatcttggaaaacctatcattgcgcggtagcagctggccggagacctgcatcgaggcgatcaagggtatggaatctgcttttgagacacaaacaaatggtggtcaatccgccaaggctgctgccaccttgaacggcgccgagagaccaactcaaccctgtgcccaagccacgtcatcgatggatgaacagatagcaacgctgccggttcgggatggaaataatgaggttggcgatacagatctcacgccagttcgacctcaagctttagcaccgaatggataccaaggccgttcagtctctaccggaattcatccgtttcaaccatcaattcgctcacctgtccagagacttgacactgcagaaaactacgactctactgttttctcacagtctgacaatatcggtaaccttgacggagggttagaccctgctgagaacgatttcaacggacaatattcagctggtctcattttcggcaacatggctgacggaaaccctgctttcaatccgagttttgctggtcaagactctttgccattttcatcatctatgcttttgaacgatttatggagtgtggccgatggcccatggatgattcacaataactttttgtgatttccgatattttcataagcgagcatatgcgtagatctcgtaccttagggcaatttcaatgtgattaaggattgaaatttgtttcgagcaatgaatctggaggccatctacaggccatctctcgaccaagttgttcgtcaagcggacatgtctttctccgagtggggccgtatagcacatcccggacattcgcatctccgtccgcaccccgcgacaattatagtcgaatgagctcgcgatgaggggctacgcgataggtttatgggcagtttgcaggtggagactgaaatccgggaatttggtgccgacttcctttaaaggcttcgtcttctgccgtttatcacctaaatcacctccaacaagaacttatttatcataacatcatgtctccaccagtcgctagtcaaaagacctacagcatcgcatccatcccagccgatggaattggcccagaggttatcagtgctggtatcacagctctgaatgccttgaccgatactctcaagacgttcaagttggagttcaagaactatgattggagctccgagacgtacaagaagaccggcaaatacatccccgatggtggactcgaggagctcaagaagcacgacgcgattttcttcggcgccgtcggcgctcctggtaagcagacacaatcaatgccttggagacattatactaaacaccagagaagacgtcccggatcatatttccttgtggggactgagactcgccatctgccagccgttccagcagtatgcgaacgtgcgcccaacacgggtattccgcggcaccgagtccccgttgcgcaagtgcggacccaatgaccttgactgggttatcatccgtgagaacagcgagggagagtatgcgggtcagggtggccgttctcacaccggaaaaccgtgggaggtcgcgactgaagtttctatcttctcccgtcacggtgtggagaggattatgcggtttgcctttgagactgctcagaagcggccgcgcaagctgttgacggtggtcactaagagcaatgcccagcgcaacggtatggttctctgggatgaagtggcaaagattgttgcggttgatttccccgatgtcactgtggacaagatgcttgttgatgctatgactactcgcatggttctgaagcccgagagtctggataccatcgttgctaccaatttggtgagttgccgatatagaatgaggcatcaataggtctgtggactaacgatcaactagcacgctgatatcctctctgatctcgctgcctctctggctggatctattggtatcgcacctacctctaacctcgaccctacacgggagtatcctagtatgttcgagcccattcacggctccgcttttgatatcactggcatgggtatctccaaccccgtggctacgttctggacggcttcggagatgcttgcttggctcggcgaggaggaggctgctaagcagctgctggtctgtgtcgaaaatgtctgcgagcagggagttcttacccgtgatttgggtggtgacgccacgacgaagcaggtcactgatgcagttgtggcggagattaagaagcttgcggctcaataagtcgtgtccaatcacgaaattttgtttggggatgagcaatgaaattgtatagttgaataaaatgagtgggcaatacattgagacctagaagcggctacaatgatgaaaatggaaaatgcagaatgaggtgaaagattcaattcctataaaatgccttttgtatatataccccgtaacatttaagaggatacctcgcacttccgtgtatcctacaagggaaaccttcgatatatataatttgagtgtttgttgtgatcaccgatctcgaccgccttttaacctccatcaactcaaccatcactctcatagaaacatttgaatggagcgcccgtccaaaagagccaaaatcttatcagattccgatgatggctcagcgagtacagccttgacgtctttgcaaaggaccattagcccaccattgccacgaggctgccccgaactgactgatgggaaattgacttctgacactggagacactggaggcactgctcgccctcccaagttggtcaattcgccagtacaacttacccatattcgagatctaccggatggtaacaatgtcgacaccatccgactacgtgatattctcggagatcccatgattcgcgaatgctggcagttcaattacctctttgatgtggattttctcatgtcgcagctcgacgaggatgtccgcagtctggtgcaagtcaaggttgtgcatggatcgtggcgaagggaggatacgaatcggattcgaattgaagtaagtttgcactgacgtgacttgatcgggttggctttgtcttttgaatacgtctcaccattgatcgagggtttgaagtgacgactaatctgcttctaggaggcctgttcgcgatatcctaatgttgagcctattgtggcctacatgccggagcctttcgggacacatcattccaagatgatgattcttcttcggcatgatgacctagctcagtaagattcttgcatacatttttgatcgctatagcccgatataggtctgactgaattaccaaacagagttatcattcacacggcaaacatgatccatatggattggactaatatgacacaagccgcctggcgctccccattgcttcccctgcagaagacaagctcagcaggatctcagacagacaccaaaattggctcgggcgcacggttcaaaagggatctcctcacttatctgaaagcgtatggacctaaaaagaccggcccgctggtccagcagttggatagctacgacttcggctctattcgcgccgccctcattgctagtgttccgtccaaaaagcacgtcagtgactccagctcagaagaggatacactatggggctggcctgctctgaaagacttaatgagccagatacccatccagcagaaaaacacaggcaagaaaccacacatagtaatccaggtgcgtatctccacaaaatcatcatgctgtaataaatctccaacatatccaagatctcttcagtagcaaccctcggccaaacaaacaaatggctcaaagacgtgttcttcaaagccctcaccccaacccaaacccccaaaccaacaacctactcaataatcttcccaaccccagacgaaatccgccgctccttagacggttacaactccggcggctcaatccacatgaaaacccaaagcgcaacacaacaaaagcaactccaatacatgcgtccgcatctctgccaatgggcaggtgacaccctcgccccaggccaatgcgtcgatctatccgaagacaatcccccaacgcgcgaagcaggccgcgcccgcgcagccccgcacatcaagacttacatccgctttggggactcggacatgaagaccatcgactgggcgatggtgtcatcggcgaatctgtctacgcaggcgtggggcgcggcgacgaatgcgagtggcgaggtgcgcatttgtagctgggagattggcgttgttatttggccggatcttttccgagatgggggttgtggcgatgctgcatctgcatctgaatcccgagcggaagagaaatccccgatgtcagacacgctgatggttccttgctttaggcgagattgtccttctgtgtctgagggcgccgagacggcttcggtggtcgtcgggttccggatgccttatgatctgccattgacgccgtatggtgcgggtgatgagccgtggtgcgcgactgcttcgcatgctctaccggactggcgaggggagagttggattgcttgagtccgctgtctttgcatttagtcttcttagctatattttggtgcattttcgtctcagcagttcacgggtgtgaggcgcatggttgtcgtagtatacagtgggcgggattgtgaggtactgatactgagtcatggaaagtagcatgcatttgtattcgtattcgtcctgaaaggtttgagacaatacgattatcttttctctttagataaccgtctttccaaattcactccacaacatatctccgatagatcgcgagtcattgtcccagactaattcttccaattgtatcatctattcgtcgcgggtgccgtacttggaaatgagggtgttgacgtggctgatgtagagttggtgggccttagcagggctgtaatccttgaccttctcccaagcaccgtagagctgcttcttctataaggttgcaaagagtgaattgtcagctattggccttctcccaaacgtgctatagtccggggcttcccgagctcaatcaaaagcagagcttagacgtacctggatatcgaacatgccaggcttctccataacgtcacccttgccaaccttgaagtagatgtagaggtccttcttctccagaagaccgggggaggtcttcagcatcataacagccttggcggcgaactcgaaggccttgcggagggtctcggcctcggcggcatcatcgagcttctcgaactcgccttggtcggcgaccttctcgtagacttccttcagggctgcgatgtcgatgccggcggcagcttcttggacctcgggggtgaacttttctttcttctgggcagcctccagggcggtgatgaagggggtgatgtcggacattttgggtttgaggattgtttgtttttgggtataaggaggggtaaagtcaggaacagaggatttatatggttgggatgttggagatggttgagggcggggtcaacggccctggaggtggggtggatgacacactcgccagttgattttgaggtcatacgacctcttgcatacaatgcctttactattacgtaggctatggaatgagaaggatagctttagagtaatccaggtttgtcttaacatattcaacatttggttcagaaattccattattgaccacgccgacagatgcatatccacaatgcaaccgctgtggaatcattcgctatgcaccagaaaaagataacaaaagagaaatgtccgggcaatgtacaagttcaaagatgaagagcgatcaccaatccaccgcccatccattgtgggtgaggaattcctcacaaactgccttgagggcatagttgttccgcagatcattgacactgataggagcccgagtcaaaggatcgacgcccgacttctcgacatacttggtgatgcccaagcgatcgaaactgaccccggacggtgtaatgacaggatcatgcatgatctcaaatgtgatgccatcaatgagatagtccggaacaacctggaagcaaacccaaacgtcaacaaccacctcatcgaagaaccaagttcaaaacctaccctttcctgaacctctcccttggaagcaactcgaaatgcctccctcaaatgcctaactttagtctccgcatcctcccgcagcgccttctggtcctccccgaacccaatctccccaatctccccgcgctccaagcgaccctgcaactccgccagcgcccgcgtcacatcggcctcaatgagcgcctccatagaacccagtgtctcattcagctggcgcacccgggaagtctcccgcgcagcccagatctgctgcttcgcgcgcaggaccgtctgcgacagattctctgattgggcattcttcgctgctagactctgttggtaagcttcggacgcgacgtcgagtgcttcttgtgggcgctggaggcctaggagtgcctgtgcgaggtagtagtagctcttgagcgcgacggggttcttgagaccgtagatctcgattgcggctcgcgcgtcatgttcaacgtcggcccatttggcaagtttgcttcgtgttatcgcgcggtttgtgaagaaggttgggtcactggggttcttttggattctgtttaatgaggggattttgttagtttggggacatttgaatgatcgttgggtttgcgactttggttgggagtgaggggaagtgttggaggggttaaatgtgatagcttacgcctgggagtacaagtcttcggcaccgctgtaatccccagatttgtagagctcattgccctttgctttgagttcttgggccatgatctatgtgtgagtgaggccttgagtttctccccgtgtgatctgttccccaatgtggggcggtccccatataaattcaagagtgatcggagtggatattgctgtgattcatgacagctgggggatttaaagggtcttggatctgcagtaactatgtaagtacccttttgaatatctttgtgagttcacccaaagcgcatgaaacaactgtcactatagttggttatggtctatggaaagtcatagatccccgcagaaggtctgagtcagctcaattgatgcactgcgccacatgaggtagctactattctatacgttaatctggatgaggttgactatacttattcattcactatatacatatctctgtgaccttctaatctgatttggaagcagaagtaacattcggttcgtggtatcatacgctgtgagaactaagaaagacacaacaatcctgcagacaagtcagtgcaatctgacaagtcatgctttgtcaaagatggcacaagactagaaggattcccaagacatccggagtgtttcgggtatcaggtaagacgagacaaacagcaaagacgtgtctaagcagcagtatggaactggatctcatagtccgtgatagcttggaccttggcagcagaggcggacttagggtcgaagcggtagtttagccagtcggtagccagcttcttggctaattcaacaccgatgacacgctgtcccatgcataggacttgagcgtcgttgctcaggatggagcgctcaacggagaaaggatcgtgggcagtcacagcccgaatgccgggcaccttgttcgcggcgatggcaacacccagaccagttccgcaaatgaagaggccacgatcagccttgccatccatgatgagcttggcaccctcgacggcagggtgtgggtaggcagtcttgtcggaggatgagttgacacccacatcaatgatctcggcgacgagagggttcttctcgagagtggccttgatagcatccttatatgggacaccggcctcatcgcaggccatgacgatgcggaaaggagtagacatgatgaggaccgaggtatggacgagaggatgaagaatgtacaaacaatacgagatgtattgaatcaaatatatggtagagataaatagattgatttcacacagaaaagaaatccttgacttgggagtacaacaaggggtctttatatctttttgcttagctctcttcccctctctcctttatagccgtacaaccaccgctcaggtccagccaatccttgcatttgatagaatcacctacagccgttctccaccaagagactcgaatagtctggttccggccttgatattgttacgcgtatttcagcgtccagggtggcccgccccagcatcatagcaccccacgacgggccgtgagtggtcggtgccagaaagaggttaaaccgaggtcggatactttaggatccttgttttggtccgtacatgcgtcttacctcgtattaccggcatgttttattagacctcgctggcgctggcttggaacacacaggcttcacattctgccacacaccaagccatcgatgttagtggtgagcgcaacctacaatacacgactgacaagaaggttgtggcttttcgcacaggcatggcggtccaactggcttcttaaatgctgatgcctcaaggccgagggccgggacctttggtttcatcttttcccgagtccagggttattttggtggctaaggtctgggcacctcgtatatcgacgaatacatggctatggccccggccgatgtcacctagacgggaagaggggaatattgaattgacctcataccagggaattaggttcaatgctttgaaaacctggctgagcatgacattggagggtaatgcgggatatcgacgagtgaatttgcctcctgacttagtcttccaatggtcgaatgcacaagtacacaagtacggccttattatccccaagacgctaaaccccataattgatgtgcattgcctcatagcaaaggtgttttactccactttaccactccactgcaatgttgttggtcgttagcccaccggttctccggcttgtactattgtacaatgtatgttctccggattttcgtttggatctgcactgtatgatcctagaacttgcatcctaattatactatagtaggcagatgggatgaaggagtcttggtatgtatgtctaaagtgtacatacgtccaaagcgcaataccatctgggaatagtttgattctcctatgtccggggtacggggtactagatattacgttggcttcgcttggcctatcacagtctagccaacaattattggattcggtattgagtactctattgagtactctgaatggctatagcccgggcccatgtgacatcacgcactccgtaccctcatacaacataacgtgtactccgtatggacaatcggaacgtctagcgcataaatgccactaatgcgcattgacacactggaaattacctttgatcaaataaatacttggaaatacttggaattacaattcgaaccctggctttgactttccaactttccgagaatcaagaatccctagcctcagacgggaacggtcccccctccataacacccaaacacacaactttcgcaacaccaatcaccatggcgtccacttacccagttctcccggagaagctcctcctcatctctctaaagatgtacttcaccccagaccgcacactcacctaccttcgcgaactcctcaacccaaccaacgagatcgtccaccccgcaaaccgagacaaactcctcctagctctaatcccagacttcctaaccatctggccctgcgcgcaaatcctcaaagagtacgaagccaacctcaccagcaccggaaccggaacctccccatccccaccccccttcctcctcggcgcgcaagactgcttctgggaatcgcaaggcgcatacacaggcgaagtctctccggcctcaatccgcgcgctaggctgctcaatcgtcgaactaggccacgccgagcgccgcgccatcttcaacgaaacagaagaccaaaccgcccgcaaagcagccgcaacctgcgcccagcacatggtcccgctcgtctgcatcggcgaagtgacagctcccggccccgtcgcctcccaagccgtcggccaggctgtggccgagtgtgcggtgctggtgcgcactgtgctggcggccatcccggacgacgcacccgttatatttgcttacgagcctgtttgggctattggccagccgaagccggcgggtgttgatcacgttgctgctgttgtgcagggcatccgggcggttattagtgcccggtctggtacagtgcgtgttttgtatggcggtagtgccggacctggtctttggggggctggtgggcttggtcgcgcggttgatgggatgtttttgggcaggttcgcgcatcaaattgatggcgtgcgggaggttgtccgtgaggtagaggagacgctggctatagcgtgatgatgccccaggtactcatcctcgacacgacgccttgacatttcatgtctacaattatacaggtatacggtatcgtgtttcgcactatacggttccttgtcattgttatacggaataataaataacagaccttgaagaaaaaggcgcatctagacaaaaacaggtaaagtgggaatctcaaccggctgtctccccgggaagcctatctggggaaacccgcaaactggagaacttccccggttttcttcagtcacggggccgatcagagatttccctctcagatgactttaaagctttttttaggttcggcaaacctcaataggccttggatactatgtatctctcctccactctgctttatgtgggttcattggactgatcgagtaatccgagctattgatgtagttcgcgcgggtcaattccgagcgagatcgagttccccttttcatttatttcggtattgcctgacttggtcgttccatatagaattttgcggtgtcaattggatctttcgggcgagaaatcagaaaaaatgaatgcagaatattacttttcttgtgcatatccgtgttatttacaggatctatcaaagaccgaatgagaataatcgaaaaaaaatcatagttcacaccgcttatttcttctgcagctcctcgcgcagctcctgcttgacacgcgtgacagtgccaacaccgccgtagacaataccagtgtacatcatagccaccgaagcgccggccttgagagcctcgcgtgcctcctcaccagtagtgataccgccggaagcgaagataaccttccgaggaaggccagacaccttcccgacagacttatccgaatcggtcgcagatgatgggggtccctggtcaagcagggcgcggtagcgggcgacgagcgcaatggagcggttaaacagctgggggccggagtaaccgccggtttccttcagagtcttctgctcctcggcggggaggacgaagccccggggcacggggtcgggccgacggttggtggtgttgccgacgatgacaccgtcgacgccggagttccagacagcctcgcagatgccggatatctgctcgtcggagtcttcatccgggcttaccttgaccattacgtagggcttggtcttgcgctcgacgttcttggcggaggcgacgaccgccgtgaggattgctgtgaggggtgcggctgcttggaggtcacgcagacctggggtgttggggctggagacgttcacgacgagaatgtcggcgtacggcgccactcggtccacgcagtaaacgtagtcgcgcttgatggcttcgatgtctccgtcgggggtaaccttgttcttggcaacttgcaccgcaagaagtttgcctgggacgagacttccgggcggaacgttggcttcgccgtccaagacgcgctgcgcggattgttcgtgcaggccaaatccggcggcgtaggcgaagtcagctacacgctgcttcagaacctttgccatatggtcggcgcccttggagttgaggccgtagcggttgatcatcgcgtgttgcgagggcagtcggaatactctaggcttcgggttgccttcctgtggtagaggggtcgtgccgcccacctcgacgatggcaggaccgatgtcgaacagcgcatcagggacctcggcgtgcttgtccagaccggcggagataccgatggggttagagagggtgtatccaaagacctggtaaaagacctcgtcagtgattgaccatcggcaggtttgggaataccattacctcagttgccaggacaccatcactgtccgggtcgccacgctcgcgtgggtgcagaccatattggtagagcatcttcaggttttccacgccaacgtggtgcgcatcctccgcatcgggccacaaaaggcggatcaagggtacaacgccgtatctgtggatactggctctggtgtccgttccatagatgtagcccaccagcagggttaaggccaatgaggcaccgtacaaagccttcctagagccacggcgggctttgcgggggatctccttagcggcctcctgcgtaacttcctttcccatctccttggccgcctcagtgggtggaggtgcaaccgagtccgaagcatatcgcaaagcaccggggtagcgctgggcccgtttcggtagcaatgccgacggccgttggatcaagcgggaggtaggaagagcgcgagcccggacgctggctctccaggccattgttgcagagttacaagtcattttggttgcgtatagagctaattatcttcgccggagcaacgcccgatcgaacctatacagcggttagtacttgcgattgatagtggattgtggatagagctagtcaagctctaatcgacccgcattgtaaactagccggctggaacagtacgtacagataaatatgcacctaataaagcacttacaatttcaattgagcacgatccgaggttctcgcttgcagggcggattcgggttctttgctgcacagtccgggcggtgtcaataggtcctgcagaattttgagggcggtaccattacgtagcttcatcgctggatgtacttcgtcttctatgtcttcggttataatttcaataattgttagagattacaagatgcttcgaaatattttcttatccctatatttagagcaatgtctatgctttatatgcagaatgagtgaatatattaactgacgatcttcccttcaatgatcacgaggacctcgtatcgggcaacagtgctaaggcttgggaatgaccaacctaacttctgcatctcaaatgttgcgaatcctttagcttgtctctttctccgaacagaaacccttcgttcatatccacggtgctgcatgccacctgtcccagccaaaatgaggatccaaggaagaacaaccaactctccagcggggggatctggccgtgtctatttcgacgaggaggacgattcccctggtcgagaacatgcaccctcgcagcgggagtcgaatactatccccgaagcgactcctcagctcaatcttacaaaggagccctaccgttcattcaacgtcttcaaagatgtatgttagcattccggtatggatgcagctgtctctatataatccatcataattcaaacaattctcatcaattcgcacaggtaccactcggtacaaatgccttcagcttttgccttcaggtccacccttctggaggacttgctcaatctccaagcccagtatatcacaccttgcgcatcccctggtaccgccaagggctttatctgccagcttcatttgatctttactctggtggcaatgttgtgcgcagccggaaagatccatctcctgatcctaaggaccaccgtgcgcacattcactaccgtggctttgagggtctgctcggtcttcacgtgacagtagacatcttccgccaagtaggctctaacacactccaaaacgacctcccagcctctgaggagagactggatcttgtcaagcactgctcagtggatattgttcggaagggaattggtaggacttaccgtgttgagattactggtggcggcgctgtcagaacattctactggaaaggatccaagactgcattgtctctccttcaaactgaagagaaagacgctggtcctagcgatgggaacggcaacctgaagttcttcgctgcaaataaaccagatgatattcttgcggtgtggcagaatagaaccgatcggcaaattctagggtctttgaacgttatcgccgagcttgatgctgattcggatgggatccttgaagggtcaatggtgagttgcctggcagtggttgttgcagaaagggtttccgggcgagggtgggtaggtggcctggggaagtcaaggaactcctagaaaattgttatttattgggataagtgtatctccatgtagtgaagacctaaataaaggcctaaaactcgatcaccttgtaattagcaaacaatgaacttaggtatgctgagatatcatgcgtttataaacttccatttccttgagtttcttcattctgtcaaagctatttttgttagcctctctaattaccatgtcgatccaacgaatacgctgtatttaagtagaagtgataatatgttcttcactgtcaagacagatattttagaacatcaacatatgccagcccaaagtgagctatgataccccgtacctattgggggattctcaagaccaccctgccatcaatctccgagcgctccagacggtccaaaacctcattgatatcgtccaagttaaagatgtcaatatgcgcctttacatcgccggctacggccatagccagcatctcatccatctcatccgctgttcctgcagagtttccgacaatagtaaggcctgtattaattggtcagaccggctcatgtcttgagttgcataggtattgagaactcacccttgacaatcatatcgaatggcgtagctggcagtttgaatggtttgttgggaataccaacgcagaccagcgtaccaaaaggacgcaacatctgcatactttgttcgtatgctcgctcgccattggcagtacagatcacagcatgtacaccgaatgtcgtcttgtctttgactgcctggacaatgtcgacatcgcggtagtccaggaattctgtagccccaagcgaaaggcacagttgcttcttcttatctccgctttggaagcatcgggttagcttgttgtaaatatgacacataatgttaagttgatatcacatacctgtcgattgcaatgaccttgaggcccttcttagcggcaatctgaattcccctgcaagaaatatcctcgtcagaaaaaaaaaacatttcggctatagaaatctgaattgggaatgtacatatgaccaaggccacctccagcaccaaggatggcaaggtagtctcccgggcgagtcttggtcttcatgattgaagagtacatcgcaattccagctggagacaatgattagcgtttgtattagcgaaataccaattggcaaaacattaccacatagaagaggcgcggcagtatctggcgaaagctggtccggaattttcgtcacatgaagtgctgggctgacaatatattctgaggcatggtatcagaagtgccccaatggactgggtgatggcatcgatagatagaatacttacgctggaatgttccaggtacattctgtaaaccaccaatgcaattagtaacagaaccgatggcgaaagacatagtctgtggtgatcagcaacttactgcaccagcattcttctgatacgggcatacggtatggttgacttcacaaatctcgcactggcggcaagaactgtagagccatctaatagtggaaatgcctttagcgtcaatataactccagatgagaaatttgcgacgaaggagacagacctgataccaaccctcgttcccatccattgcttctcgtcaacttccggtccgactaagggtaatgacgaatattagtatacgttctgacctatgatcagagacagtgatagttcttaccttggactactctcccaatgccttcatggcccgcaacatcagtcaacataggcgtgtcaccgcggatgctgtgaagatccgagtgacataccccagaatactcgagcttgacgaggatttcgccttctcccggagttggcaccgggcgattgctcttgatccccacctttgtggagacaggagtacttgtggatgagataacagcagcgatctgaattggggggattggggggaccgacatcttgctgcttctatgaatcttcgagatcgcgtattggagaaagtctgaatctcaacgaggacacttggcttaaatacttcggtagttgaaacctgattccgataggcggcattagtcgtatcgcagatgcgggggcgtgaggaaggcgcaaagataagcagaaacagttagcagatgccaagatatgatattggagatctcgagtttgggcagattaggcaggttagaccgggggtgaaggtggagatgggagatatcaacacaataatccactacaaactcggatagaatacatctgacacttcttttttacagttcagcgtcaataattcaattaaacaattatgtgtaagccgcaagtctgacatcgggacaatcatgaaggaatataagacaaggactccgctaggcagagacgaaggaaagaagtgctacagcactcatgcagcagaaggcttccgagttgcgagaactcgaacaccaaggtatcaaagatgaaattctaaacccgacatagaacgctagaaaatcatgcattctcggactggattgtttgctgcaagtaaagacatagttagtttgagaaacaagcaggttgcatcgggagagaaaccaaccactagccaatccattccctcattaatacccttgccatcaatggcagagcaagcaacaatactccagtttcggtctcgcagctctcccagcttcaaagcctctgagatctcgcctgcgcccttggcaccgggctgatcttgtttgttggcaaacaccagcaatgccgcgtcgtgaagttcctcctcattcaacatggctgctaattcatctgccgcagtccctaatcgctcaatatctgtggagtcgatgacgaagaccactgcggcggtgttggcgtagtagcatcgccagtatgggcggatagaagtttggccaccaagatcctacaatccagggatgttagttatggcccgaacgagcttaaagagggttacaacatacccagacattcagattgagattcttatatgtgacagattcgacgttgaaaccgattgtaggtatcgtagtgacgacctcaccgatctgtgggcacgaggtgtcagccccgcgaatctcacttgaacgcgccagaaaacccaagtttcaaagctataatatcttaccttgagtctgtacagcaaagtagtctttccagcgttatcctaaatacccgaaagatgttgattagtttcggtccttgtgtcactaatgagatcctgcattccccgcgtgggatgcagatgaggcacaacgtacaagtcctagaatcaggatgcgaatctcttttgtggaccagagtagggaccagatacgtgatagtgaacctcccatcgtgtgtaagattaaccagtgggcgcgttgttcactgttcggtgcacagggtgtccgggcaagtatgggccgagggtggtttaggttgaggggcgcgtaaatggtatagattgagtggaatgagacaaactcgctatggtggtatggtacaagtagttgagatagagatgaaagagaagaaaggcactgatggcagccgcattggatgttcttggccgatgggccagtgcggtgtgggcggtcaatcgggggatcatcgtcttgcgggattgagcttctcatttagaaaaccacattgtgtcttttcctctatcatattctggtcttgcttactttatcgcgttctacgcgactatccctcactatctgaagtgcaaccgggccactacaatcacctccggcgcactccctagatctgccgcgattagtttcaattgaagacagccgaccaccacccgataccaccatggttggaaagaagtcaggcaaggccctccgggatgagggtaagatagtccggtcgagctgttggaatacagccatcaagaacagagcagctgatacttgacataggcctggagcggaccgacaataacatggaactatccagctggccgcagattccggcaatcaatcagaagaactactatacgtacgtatctaggctgatgcctgccgcacggctctatttgataacatcaatactgattgcgctatgtagggactacctgaaacgagacgatcaaaatctcgcgttccgactacaaaacgaggaagcaaggacaaagatgacgaagaaagcgaaggatcacgaccgtgccctggcaatggccaagaccgagaccgagaccgcggaaggcgagggtgaggcagatggcgacgcccaaatggaggatgcggaggagaccccggccgagatggctggctctaaggttattgtcatccacatgggcagtcagaacctccgtattggacttgccagcgacgcactgccgaagaccttgccaatggtgattgcgaggaaatcggcgaccaacgagtccgaagaccatgatgaacctaagcccaagagattcaaacacgacgatggctctgaaatagagcccgaaaaagcctttggacctgaagtatgtccagtacaacttgtcgagatggccttgtactaattttttttgatagtggtcgtctcatttcaatcagatgtctgcggatttaaaggtgcacatgcgacagaacaagcgaagaatgcttccaaactccaaggagatggttgtcaactataaccgcagaaccgtgccagaaattatctctgaacacaatgatccaatgcgtgctgaatggactgagctctctaatcccccaccagagtatattgtcgggaagccggctctgcgggttccggattcttcgaaacctcgttacaagctgtattggccaatccggaatggctggtgcaacgagaaggactacacaagcaagaggtctctcttcctggatatttcattgatcgtggaggatgcgatcaagaatcaactgcgcttgacgagcaagaaggattggacccagtattcgtgtgttttcgtcatcccggatctttacgacaagtcttatgttacccaagtcttggatatgttgatgcgagagtttgcgttcgctcgggtgtgtttcatccaagaaagcctggcagccacctttggtgcaggcttcacctcgggatgtgtcgtcgatatcggagcgcagaagacttcaatctgctgtgtggaagaaggcatgtgcatcgagaactctcgagtgaaccttaagtatggcggtcaagacgtgaccgaaacgttcatcaagatgatgctgtacgatcatttcccctatgccgatatcgacctacggcgtagacatgacttccttctggccgaagagctcaaaaagaagatctgcaccatgaacgaagccagcgtttctccacaagtctttgacttccaccttcgtgtggcaggccaggatacgcgaaagtacactttcaaggcttttgacgaggttcttcttgccccaatgggtgtatttgagcctgctatttttgataactctgacaaaatcaccgggagacggaccctgatcgatcgttctgttgacatttatgatggatcacctaatgatcctacttctgcagcccagtcggagattttgaccgccatggcccctccccttccccgcggcaagacgaatggcgagtctcacttggcggtgccggatgttcaggccacaccaagccgcccccacgctttaagcaaactcgagggcacacctcgatcttctgtcgctggttctccaggaccggaaaatataggaacccctcaagcaggagggacaagcacgcccgctgccacagccgctgtagcccaagctccccgccctcctgccgtggaagatcgagatgatattatgcctgtcttcggtctggacaacgctatcctgacctccattgcccacgccgctcgctcagacgagaaaaagatgcgggatttcatcggcggtatcatggtcgtcggtggaggcagcttgactagcgggttccatctcttcttggaagagcgactgcaggctctccgccctggcttctcaaaggagatcatgatcgggacaccgcccagagatctcgatccccaggttgttgtgtggaagggagccagtattttcggcaaactaagcggtacaaacgacagttggatcggaaggttggagtatgatcgacttggtccccggctgatggcgtacaagtgcatgtgggcgtactgagcacttcgggatattcatttatggtattatgagaattcggcgtgggagttgcatgttttgtggtcactttcaaaaggaatttctatattttttctaatacaatggagtactttgaatctcgcaatcgataattagttgacctaaaagaaagagctgtgtagttgtgagctgttgtcctgaggttgggtaaatgcacgcacttatctgcttccaacactttcatctccatgatttatgtcctttcacgtgatatcttctgtatttccacgcgtatattcccacaacgcaataaacagacggtgaatccgggcagaataatggttctcaggctcagctccggggttgctctgtatggcttttgccgattcctccagttccatttttggccagtttggatagccccttctactggcgagccgaaccactggattctgatatattgccaattttgctttctaccgccgtccttgcctttctacaagcccttgactttcctcacggtaggtttgcgaccaattccctcacatccattttgaatcgagctcttatactaactggccactatagagttgcactaccattttcgctcgccaaaatcaaggcgacaacatcctaattcatcctagtccattcaagtccattccagtccattacggtaagcttccgtcccacctagtccatgcggtacgccgagttgctaatgcgcaaaatcacccagccaatcgcgtgaccaaataagacgacagtatgtcttccaaatcaaaggagggtcagtcctcagggggctttcaccaggaatacattgcgtccctccgctatcgcaatgatctccctcccccggacatgccccccaagttccttgacatcccacacgagggcttgagtcgcttcctcacccccgggtttgcctcaaacctggcacgccgtgaggagcctaacattgaagtcgatgccgaaggtggaatgccaattgatctagtcggtattccggggttacatttgggcgacgagagtggtatgtcaatgcagaatcccctatcattgcgttgctgcaactaacatatccaccagctattatggcaccagagaaccctcagcccatggatcccgctgaccttccccttctcatgactattgagcaactccgaaaccctgcccctaggaataccaatgtcagtttcctccgccgtacgcaacatatcggtgtcgaccgcagtggcggagatggatctcgccctgcacctattaaaacacaaccgcgcattgcgaagaaaggaaagcctcctgtggatgacccgaaacatgttaagaagttcattcaaaaaggattcgatatcgcctaccccaagagcaagcacgtcggagaggacactgatagccacatccgtggtcttccacccacaaaggcagaacttgatgcctgggctaatcccgtccaccctgacaacccgaagctgaagccagtcggggttttccctgtgatgcctgatctggaagggttcccagaccctggtggttaccttcaattcaagtttgataaggcgcctttaacagccgtcggaggcaagcgggataaacgtatggatgttggtattctgacaccagtcgcgcccgagcagcgtatttgccaggagcatgaatccaagctgaatcttcacctcacgaaccctgttctttacgcccacccaggcccagttccttatgactaccaactcttccttccagagaagccacagtctgttaagaacattgacgcaagcatgaacctgtccaacccgaaccgagacagcgaagacctatacaccaatgagagcgccgagggcaccaaattccaccgttatgatcgcattcgcacttacgccaccagtgctcaggtcttcaacaccgatcaaaaggacattgcattgacgctcttcaagcccaaggatggagacaccaggcaactggccgcttactactatccaatctcaggcaaggcccgtctcaagccggagcgcgcccgcacgattgctcaggccggtctcgctcccacttccacccaacaagaagagaccgaggaacggattgaccagatgcaagtagttatgcgtgatcccaacgaggctgaaatctacaagcgtgccttgacccgtctgcgcgtcgatccaaagtttgcaagcaatatgccacccgagcccgttgcccaggaggaggagcaatcgttggataacggggagacagaaaagccagccgatgaggacactcgcatgagcgatgacgaatagtcattcgcagctttctatgatgtattatggatctattttttgaacattgcaatctccaaatttctgcctaggtagtttcccatgggtctggcgtctgagcaatggaaaatggcgttacgtatagtgaatttttttactaaagtagttatacaatcaatcgtctcatacattcgcgaatctagttttgtatatttgtatgtattaggccattcatcccaagcctcaattagtacgtgtcgccttccagtcccgtaagtttacgtcaatgtgatagaataagtcatttctccaagtaatgtactcttcgcgtactaagggaaaaagattagcctctatacaaggtcaggtctaagtgatgaacaaacaaaaggaccagccaagtcttacataatcatgccaaggtgattgctgactaataatacgggcagcctggaggtaactacgctgtacagaagtggccattctagtcctaagttctccccatctaacatgctaaaccgaaaatcctctctttctgaaatgtagtgcagctatatggtggtctgggtttccccactgtagtatgttcataaagtcttatccccccgtggtctcatttacaagatcccgcatagtagggcgtctcgcatatgggaaacaacatcttctcgttgaaaatagacaggggcatgcgaattcaacctggtctcaactatcccctagctaggcttgttcaaaatagcttttcttccgcagcttctttataataccactgactttattccagccttcagagatgatctggagatgaccttcctccagagtcgagggtgtgtcgacaggcactcgcatgaaggccctagtgtgggttaaagactaaagtcttgttctaggagatcagagtggctcactgaatcaacgggtctctttgtgtcgcccacgtaacaatctggattgtaacctgccacgggcgagccgtaatagccgcttcccagtcgagagacccagcttcgacggtggagatggtctgctcttgtttcctaagcttggtcaacggtgttattactcctgagagatctttaacgcttacaccgggttgcctattgagtaaagttgaaatgacattgaaccatcgagttcgaatgattgcccaatcactctgatactgtcttttgatccatcttctagtgtgatttctggtgtgtccacgtggactaacaatcgtataaactgggttgaggtgtagaggccatctaaggtgagactcgcaccagctaatgaccgtcaggttacggaacagccctggtgtgttggaggattacgcaccaatctcttcgtttctcaacaggcccaacagaattcgaccaatgtatattgtttggagccccataaacgatggcgctgtgaggcgtggatctttcacgattgaaccaagcttgtcactttttatcacctcaaggcacggttcgcgtatcctctcctctcgctggtcttctgtctcgcttcgtatctcctttggatctaattgaacttgcccatggtagaggaccacagaaatgtctgccggtgtaagatattttatcacctgcctgtaatatgaagtggtggcccattccttactgaaaaaggcttccacttgtactccgggtaacattggtggcatttggtactggagactgcagatgaaactgatgtgtaatggaattcagtaataactaggaaagagcagcgaagagaaaaggagacagagggagcaggttggggaatttataataaaacggaagtaggcttcttcctaatgtgggtgtcaccgttcttcccctgcaagccaaagccatatggggctatgccctctctaccagggagtaaatattggttaaaccaatgagcagtagaagcgaattcagattggggatttttcactggcttgcaagggtgacggggccagcgaattacgcgctgggaatgcagctgcacttcagtactctcccgcagatcatggtttcttttttccccttctgcctcctcctttttcttcatttgttattgcgtacagctcacagaaaaactcccagtgagagggttgaatgatagaaaaggccagcctagtctcccgtacacctctgccgattcctccagcggaaaccatctcagggcgaggacgatacacaatcgaacgcttccgagctaccacatacccttcggcattagtgtgcacatttcctaacatcgagatccgacccgtggtagaaaggagccattcggagactatgccgagaaagctcgtggggtcttaactctcaagctagtcgtcaaaatgtcttgatgtatatgtatgtgactgtagatttcgaagggtcctcatagaaacaatagagagtatactggaatgtccgcagcattaatgctaatacatagacgcaagattatatctcatgaatcgtcgcaatctgttacatgttaccttgaccgtcatgattgaccagggttatccgactccagcgcttgttgcgtcctggttgttgcttcctgcataggcccatgagctagatttgctttttgaaggaggtcaaagcgaaaattgggaggattagacgaagctttacactcaaagttggtaagatatggtttatcccatatgtacagattactccaattacatgtgatagatagccttacgtatcatttcgatggaggggtgaaagaatagggaaaatgggatggaactctcccaaacccaagtccaacccatgaatgcctaacttatcacctgctcttcgacccctgtctcctaccccacccttggaatctacgcaaatggcaaacctcaatctctcaagttatcatcaacctatgttccttgtggcatcaaaccaaagctccttcgacacgttatcctgtttgccaagccgacttaccacgttatatttcacacaaaatcgttgcaaccccaacctatcaccacctagctgagttggagctactgctgttcaatacccttcttctcgagcaatgattctcactgatacttatagcaggtgtctatgctcgtatttgaactgactactacgacaataacgaaagaagtcttaccatcaccccctagtcttacgatcgacatctcctttcccgacattgcgatgaagtggttctcttctctgcgggcaatgatatttggagtacaaaggaacccgtggagtcttcaaaggacatttcagcgacggtctagtctgtaagggctatttttgcgtcaaccaaacgacgtctgcactatagttgtgtcgcagcctactcaaagctcaatgataaaatctcttcacctttacacatctcattgtatcaatccattttctttctctcatttcggagatcgtagatcagttgtgatctccgactcttgcacaacctttagattagtacttgaaattatcctgtacatgcttttcacccttgtatttacccaaatatgcgcctcatcttttgaggatctagtagcatgctcaagacaccagccattgacaattgggttgggtgatgtattggaggtacgcactcgagttccatcaattatattcctacacgcgaatagtgcggtgatagaagaagtcactatatgtacccttcgaaatatgtttttctatgccgactacctattgaagttgcgtccctagatataactctaaatggtggggccatagaggctcctaggctaaacctgaaagagcatattctttgggggctaaaataattgatctagtcatttcatgcttacaatttccttactgtaagttattctgcgagaacatcaggctcagaagtatggatatcccgtttttcgtgtaccgaaagtggtttcactcttcgtagattcatccagaccttttgatgatatgacggtgtatttaaacatatatgacgggggaatctccaagactaactgcttcgaggacacagccaagcagattttcctggatcttggatcgaactatgcatactcccaaacataggttcggacaattatgatcttgattaaacagcttatcttacaaatttcataggccattgagaaggggtgctgctatcatctataacggagcagaaatccttgtccagggtgactatccaggcctgattagggaagcatacatcgccacagacagtatctcatacttctatgtgatagacaattggtaaactagggctagtaactaactaaccagagattgatttagtcaattcatgtagcattcgtccatttgcatttttttgcggcattttagttgaactaaactcgatatagttactgttgtgtcgctcattcattcaactagatagccgctattggggtgttttagtactgataacttgtcattcattcgagtgagcatggtagtctcggtaatttctcgctggttcctgtctggtggtgtaagtaacataaatagagtaagaaaggccaatgtgaagtatggattcctaacacttttatatataactcgacccgagagagtttaagagttcggattgatttacaaactgaattgacacactaataatccgcatatgatcgcgagatgctccggtcctcgggatctatctaagcccttataataaaccgtggtgacactgagatcccatcaaacctggggaactcccagtgtgctagcaacccgggatctgattggcgcccgtgggccctgaagattggccctggtggcggccctatggggggcacggcatgccccacgggccaagtcgacgggacccaacgggcagtgccaagacttccagggaaccacatgggaggtgagtgggctgtgagtggcccagacatcgggggacgacgagctactgcaggaacccaattgcccttagagttggatcggagtggatttgcagtcaattgggtttggtcggtgctgctttcggatgatcgactgttcagtccaaatggctacagtggtccatgtacaagctactttcttcatgcccgttggtatacctgcaggtcatgtctagtgtaccttcgcttgcccctccactctctcttatcaatgcaccccccatgtgttgctgtgatagaacgtgctacacgttgccgtcttcccgtgggaggggtcaattagagccgattcgctttatatttcaatctctcggtcgcttctcttgctcttcgttgaatcgctctgaatattgaacatggattggatgcacgtctacattgtcggggcagccctactggtattcgccctagtcggcttagttcttctcgtctcctctcagcacatcaaggttgccaacactggtgctggaccttacttgaaattcatctgggcgaacttcctcaaaccccatgataagaaggctggaggccagcaagatgcgttggagagcttttacaagactcaggttcgatcgagtgtgtgcttcgatatggctctaagctgaccgtgttaggccgcaatttacgatgccactcgtcgtcgtctgctctgtggtcgagaggatatgcttggcctggtggctgcacagctgaagtacaaggtcggcaataaagaagtcaaggctggaaaggctgtctgggtggatgtaagtattggattgctattttccgagctagcgctaatcgattccaggtcggtggcggtactgggtaggcacgaaagaaaccccgaggtgatacagaacatctaactcgcgatagatacaacatcgaagccatggcggcctttcttccggtggacaagttcttcaaacatgtttatctggtcgacctctccccgtccctctgcgaagttgcccgcaaccgcttcgagcgtcttgggtggaagaacgttactgttctctgccaggatgcccggtcattccagcttcccgggaagaacttcgatttgcagtctacaaatgcagcaagtgatggcgtggacttgatcactatgagctacagtctatcaatgatccctggtgagtatttaagatccacgcaagactattgatattgactttttagactattacagcgtggtggactcattaacctcccgcctgaaatcaactggaatgttgggtgtgtgtgacttttacggtaagtaatacctcgaggcttagcatgaatgtcactcattcagtatagtccagagcattgtcgatgtgtcctgtcgcaactatactggcggcgctttcaaccgccatgtcaactggcttgggcgtgtattctggagagcctggtttgatttcgaccgggtcagtctggaagctgcccgccgagactatctggaatacaagtttggtactgtcatctctgccagcgaacgaaactatttcctcggtggtattccctactacatatttgtcggctgtccaaaggagatggcatctactccatcaagtcaatccattgagaggctggatgcatcttttactgaatctccttacctgcttcctgccaatcacaagcaggagatggataacgcagtggtgaaaagcacacatgagattcgctccaaagcatatgagtctgcggtgattaacctgagtgccaatctgcctcttccgtcgtccttttaccagaaccaccactatcgcatttattacaacgacatgctacccaaacttactcaattccagaacgaatatatctacgcgttcacatgggaagacccgcgagttgaccaccgcctcctgaacatcggtaaagacgacgtgatcctcgcgatcaccagcgctggtgacaacatccttgattatctgcaaaagagcccccgccgggtgcacgcagtggacttgaaccctaaccagaaccatcttctcgagctgaaggtcgcctgttattcggcgttgggccaccgggatatgtggaaaatcttcggtgatggcaagcacgcacagttccgtgaactactaatctctaagctcagccctcacttgtccagccaggcattccagtactggctcgagcacacccagatcttcacctctacctctagccatggtctgtacgagaccggtggatctcgccacgccatccgtatggtgcgatggcttttcaatatcttcggactccagggtgaagttcgcaagctgtgtgaagcgcagagtctcgcagagcagcgcgaaatatggcctcgcattcgacgtgtgctaatgagcagaccactccactgggcggttgtgagcaccgaatggtttgcctggaaggctgctggagtaccacgcaaccaaagaaatatgattgtcgacgacttcttccgccgcaacggcttgacggaagatatgaaaaatggaaaggacgtcagcggccaatcgatttgggaatatgttgtcaatactctcgaccctgtgatcaacgatactttgatcagcaacgataactatttctacttcctttgcgcccagggaaaattctcacgaaggttcgttttctcttatatatatctcgactacacgtgctaactgcaattacagatgccaccccacctatctctctcctcaagcacacgtcaggctttccacacctggtgcatttgatggccttcgcatccacaccgatgagatcaacgaggtgatcaaccgtatcactccaggaactctgactatcgccgtggtaagtatcaaaatagcactcaacgggctttccatactaaccttgcaccagataatggactcaatggactggttcgatcccgcagaggacacggcccctgcccaagctcgaactttcaacaaagccttgaagaagggcggtcgcatcctcctccgttccgccagtatcaacccttggtacatcaagcactttgaggaaaacggcttctctgctcgtcgagtgggagctcgtttcccaggtacatgtattgatcggtgagtttcggtatttggttcttgattacgttacggacgaagcttatacatattttctagggtgaatatgtacgcatcaacctggatctgtactaaaactgaggacttgtcacgcccgaatacagatcgcaaaatgtcgactctatcgttgggggaaagtgctatgattgcaggcaagatgccgagcagtgtggagagtctgttgatttaaattggcgataattgttttcccttgatgttgcctgttcatgatacctatgatctggagttaggtggagttagatagagtgtttcgtatgcttgccttcaaaagcgcaggggtcaggagtatgatactatatgaaataaccacaaaatacatatatttgtcgatcttacatacataaacgttcatgatttcaacgactattaagccaaggatccttcaaaagctcagaggcagattgcctatcatctggatctcactgcaacatttttcgcataaattgcaggaaaagacgcctattttcaccttcaagatatacctccgaatcctctaacgataattcagggacactgacttgtcccttccattgacctgtgtatattttagacatgcccaaacggttttggttacggaagggagactagaacaccaaattgatcccaatacctttgacctcgaagacaatgcattggtgcttgcctttgggaccttctatttcgaaagaatcgagcatggtacgaataagaccattcacattgtgtctcgtttgtagctccgaaaaccgacttagaacttcgacttctcgattctttttccagtcgtgaatgaagattttcagggcaatatagcgatgtttcctaggctcggtttagtaagatagcaaacagtgcacgcggaaagctactgtaatttactcgatgtcacggcagagccaaagggttgaattcgctccaaagcccaatttgctgataacttggtacctagtctggaatgtatccccaaaccgaacaggatagaagaggcctatatcataagcaggcattcgctcctcttcaacctttttggtcggatagctcgatagggggatggatttcggcaccagaaggcgcgaccgaatccaaataaaagatgcttcaacgaaatcgggttgactattcggatttcaatgagaaagagacggctgattccgaactcgtagacgaaaaaagatggtcaagcaagaagacctggaaggaaggggccttgttattatgagagcatcgggtagtggcatcgattctctcaccgttctgtatgtaagcgacgcgactgggggtagcccctgtatgttgtacgctgaaggcttaagcgacaactagaatatatcaggaggcactgaaattatacagactaacggtttaatttgcggtactgtatatattgattctattcaagaggtcgaaagctaactaaatacgtatctctggctgtagactcataaccagagtggtagccctcgccaattccagtccaccgcaacctatcctactagttttcggcagaatgcgaaagattgcacagtaaaatgagtaagagggagacataaacaccagagcaaactcgtctagaaagccagttgatagtatctatggatatactaaggaaaatcaagcttaaaatctgccccattccgaaccttaggtattaaatcacggggccccacaactccgcaagtcacgaatatattatggagctgcttaggtacggcgtcgatccttagagagggttctagcggccgatcttcaggcgttgatttgagcacatttgcgaaagtagtctccatagtcaatagcctcttcccgcaagtcttagtatttactcgatgaatagatccaatattctctccattttcgggtcccatagacattggcacaatttatttttggacttggctatatctaaaccagcaaaccaaagatatgccattcgactcccaaggttgtaaatggtcttggtaagatatctcagatatctcctgtctggatctatagcaaatggtagacaaacatactgacggaccctgaaacagtgaatcctgtattcgaggacaccgctcgtccaaatgtgcacactatgaccgaccgatgaagagaatccctaaggttggacgtccgttagcaaagtgctcacacgtcaatggggctgattgcagttgtcaggaggcttgggcgattatggttcgtcttgctccaggtacgtcatgtcatgccggagatttgggttagagatatatttgtagtaacgtttgtcggtttgaataggatcgatggtttgcagaccagaatctgagactcagccggtacagcagcagcaggtcgatcatgtttatgctgagggtatatgattatttttatcaatgagcatccttgttttataaaggaattaggcaaataatgaagtatagatgatattgtcattctaggatcaatagctctaattaggtatttcaccaagccccctttgtgagtcaccacacagcgctacgcagtgcgaggtaaagggagctaagccagaacttcaccgcaatcgaaactccaatcatccaccatgacaagtcccttcctgccagccagggattccctgagagaatcttccaagaagcagttcgcccaccaggacgccgaaaagcacagcaacgaagacgccgacgttgaaggtcatcacggatagcatcctaccaatgccaataattaacgattatccaataagtactaagtatacagacagccgcagatggaacaactcacaagaaatatccaatcaaagccctagcacactcaagcaatgcacgtgtcccgtctttccacagactccaggttccactggccttccaggatgggaccaggcgtttcagggagaacctattccgagggctatcctttatgagatattccattgacgtgctttgtgtttcattgtcattgttcgagactggcaaattctcctcatcggggtcctcgtcctcgtgcacgcgcatgtagttcggaagaggactgagctttgcttttcggacgccttttcgtggatttactgaggcgagaagcagagttggagggggagaggtatgctgggaccatgatttctcaagttggaatttcagggcgccaagagagcggttgaagatggcgaggaggaatagaaaggtcaatgtgaagacatattgcgtcgtggttgaggttgtccagccagtgaagaggattgtaatttcagtggaggtcgagaacactgctggcatgttcatacccatgttcatgttcgcgctaggatgttccctccagtgcgaatgagagtcagagtcttaaggcagagttcacagtgttgtattactccatgttgaggatggtgagagtgggaagcctacaggcaacaggcaacagacgagacgagaagattagacattcctctttgctctagcggcatacaagcgcaaatccgctcatctccacatgagatgtctcaaacgagttagcttctcgtttgataaaccataaaaagaatgattgtaataagaaaaaatatatatttcaagttagtttattcattgacttcaggtctaatcatatttcacaggggaagaagactggaacacgccaaagcagcggccctctaagcaagtagtgattaaaaaagagtctgggaaaattcataaatggactaccatgagtcccgtgctttcacctcttatcatatcatgcccgtctgttgctcaccaagccaaagtgcgcatacagataaatgatatgcacatgcgaacgatcgtggatatagagtcagagacagaaaaaaaagcccagagaccgaaactctcatgaacggccataccgcgtctttccgaaggagaaaggcacgtaacggtacttaatcatatgctggatttgtcgtcgcactggaaaaggggtcaagttagacagatgtccatataaaaatgctataggtatcggagcgaattccgaccaaagggcaaacatactcgtcagcacaaacagaatgatccagtaaatgaccagcaccggccagaagacggggatatcgaagacagcgagccaggagcaaacgaagccaatggcgatggcgcgagtggccgagtgccagaacttgaactcaggcagacgtcggatgaagggacgaaactcctcgtccttcttggtagggaggctgggggacccggcgtcaccgtcctcaagaccctcgtcctgggtgagagaggggtcgaacttgggagtcaggaaagcgaggaagaggttcaggaggtaaattccgagtgtataggcgactgtgattcaagatcccagcgttagcggtttgtttatgcagatgtttacagcaccgcggatgaatggctcccgcgcgttggggttgaagcgcatcattttcgctttgctgattccatttataggggttcgatagagccataccgatgtaccagccctgcgcgaggaaaatgcgcaggaagaagaggcacaggagcacaccagaaccaacccagcggtaggttgtgtacggagtcgaggcatcgaggtaggcttgatagtgctgcgatcggcgtattagcatgctggtcggaccattcggctgatctcaggaatgaagaatcgaaagacatcgcgcaatgcctttgcccctcatgggacactcactcgagtcagtcgagaggtgtgcgccgacacggctgtgaagggagactgatcgggctcagggacatccatgatgaagatattagggagaagaagcaaagcacagggctggaccactgaaagaaagaaatgaaagagggaagcaaaagaaaagctgtgattaagataagctgctgaaaccagacattccaggtcaggcactgcacttccttcaggacagagaagtgtccactgcccacgggccaatcagcttagatgcgaatcactagccatcccagtgcacgtgatatgtggcgaagtccaagatgtggcggtgccgtgacataaggcagacgaaaagggcttagcccaattcgaatggacctcgggacggttaacttcggcggttaattttggcggcgttcagtcggtcgcggggaaaccgaccatctatgatgtatcgcgtcggtagtctctctcccttctctgcattaatttaacctcaattgtctgaacagaagtaattatatttttcttcacgtatcaaaatgtttgctcgtcaatgcactcgtctggccactgctcggacatcggtccccttgacttcctacctagcccgagtccggggttattcttcagccgctggtagttacgagcacatcctcacttcggttcccaagcccggcgtgggattgagtatgtacaatcagtcaatataatgccggccacttctcattgctattatagttacccttaaccgccccaaggccctcaacgcactattcactcccttgttcaaggagcttaacgaagccctgaccaactatgacaatgacaagagcatcggcgcgatcattattacaggaagcgagaaggcctttgccggtatgtacatgtcctatttacacttttcacatcctatcctctcccatcatgcctcgccctaatcctaaagtacgtcaacaatactaatccaacaaacccaccatagccggcgccgacatcaaagaaatggcccctctaagcttctccaaggccttcagcgagaacttcatcgcgccctggtcccacctcgccacctccatccgcaccccagtcatcgccgctgtctccggctacgccctcggcggcggctgcgagctagccctgatgtgcgacatcctgtactgcaccgagaccgccaccttcggccagcccgaaatcaagctgggcacaatccccggcgcaggtggatctcagcgtctgacccgtgcggtcggcaagagcaaggccatggagcttatcctcactggaaagatgttcagtggtaaggaggctggtgagtggggcgtcgcagccaaggtcgtgccgggtggtaaggaggagctgcttgagcaagcctacaagacggccgaggctattgccagccatagccgtgtggctgttgtcgctgctaaggaggttgtcaataagagccaggacttgccgctcaaggagggtattgagtatgagagacggttgttccatgcgctctttgggagcaaggatcagaagattggtgagttggcacttcggtttgctgagtgagtgggtttgctaacggttattctaggtatgactgcctttgcggaaaagaagaagcccgagtggtccaacgaatagatgacaaagtcatttggaatgaagaagctggtttttttcatcgcttgcgtgtaattcacgctgaagctgtagaacagaggattagttataagacatagaacagtatcatttaactcgcttgtgcctgtaactctcgactgcaatctcatatagctgggtgcctcatccacgttcgtctcatcttccaaattggcattgccggttgttccgtgattttacttggtcgaggcatactaatacgaaaggtcatatgtcagattgagggtcgagaattgccattgatgtaagagtggaatccggactaacgccaggtgcccatgaatatgcaggcaatgggctcttcagtgctaaaaaaagaagtggagatatataagaaactgcagtggtttacatcaggagcagtgtgactttattttgtttgatcatcatggaaagatattagattactactgctattctatttgctgaaaaatgctatatacatagggggcctatcaagttcgggcccagaagcagaattaatcgtaaacataagatacatcgcatcatatcgaaccgtgatttttctccaattcgcattcatcggttcgggtgtttttatttgcccggtaatcatcaatgacttggctctcaatggtctcatcaaacacatccacttgggtggtcgcaaacttgcgagcgctgacaccgcgctcgaagagcaggtcaagctcggcgaacgtgcggccacgaggctcgggaacgcggaagtacgtgtatatgatgcacaggaagcagatgccaccccagaagaaaccggcgtagttgccccagttccaggcgccggggttcagcatgtaaggggtcagaacgccgcagacgatggcgacaatgttgtacaggttgcggcccagcacgactgtcttgatttgcagtcggcgggtggaaagctcggcaacaagggagaagcagaccgttccaacggtcagctggtagaatagggcccagatcaacatcattgaaccagtggccagggagccttggtctctgtgttctttgggaacaaggccaaggaaacccatgaccaatagcatggtgcacagaccacagagaccgtacagacataacgtccgccggccgattccgagtgtcataaggaaccatgatccgaaaacgccaaccatattgattccgtattgacccatagcaaagttgtaagagttagaggagtctaaccctgcctgttttaagaagtaggtcgagtagttggaaaaggagtttccactgagattttggatggcccagaccatacagacaatctctgtgcggcggagatcagtgccccggaagcaatccaagtagctcgcaccctgggtgattttttcctccagggcggtcgtatgaaccatcatagcgacagtctcatctggatcgaaatccccatcctgtccctgacttttggtagtcaaacggagaagggcccgtttcgcatcttcagtgcggcctttccgaaccaaccaccatggggattcaggcgcaagccaaataccaacgaagagcggcagtggccacatccactgcagtccgtacggaatccgatatgcccattcgtcctcccggttcaacatgcccttaatcacaccgataccgataagctggccaagaccccagcagaaattgacataggtcgtcaaataccctcgcagcgccactggacacacctccgaagcataggtgatcgtcaaagtctgaaagacaccccaaggaataccgcagagaatctccgctgcaagcagggcatgcacattcttagccgtgaagaagatcgccgtccacgcactaacaagtacaaggcaggacataatcgtgtaccggtaaccgaatcgttctgaagcccagccgttgatgaatagaccgatgatctcgccgcagtaagcaccgttgctcagacctgcttgccactttatgtccagagaattgtcagtttcttcatctcccaaagaggcaagtccaccccactccaagagatagaggaatggctaccgccggaattggttgaacttaccgcagcggatacttgatatgtgccatcggccagcatctcaccatatttgcgattgaattgcgggaaggcgtagaagttgttgaccaaactaatatcgtaaccctccatggcaatgcaagtagagatgagcacgctccaaaaaacggctttggggtacaaccggataccctgtatcaatgtcatagaccgttccttctccgtggctgcctttgcattttgaatgaccttggtcgtggatgagtccgagcccggtccagcggctgaagagtaaccatattcgggaaagacatccaccggcgtgatggcatctgagaccttgggttcggccatgttggatggacgaaataaccgagatcgctgggaggaatggaaggttggctcgagcaacttgcgatatgggtttgagagttggcccggttcggaagtcaggggaataaaaaatcaaagtacccactatgccaggaacattgcacgcaggcactccacggcagcgaaaagtttccttgacgcctaccgagggtaagtgaatacggcagagacaaaggagcttgacaaaaagaggataaaagccaatggtccgaattggcgggggaacgggggatttgacgggcttgatcgcctccaagcgcaaattttggcgggatgagaagcttggcggtgcccggatggggcaagcgatgggtcatcgtccgaacataattcgatattcgagtcgtgctatgttcgggcttgattggtctagtattttctgatcatacagtcttgaaattatactaacagtacattttagatgtaactagatgtagtatgactcatgagtctgacaaccccacgtgggggaactataaattccccttgcagtaatcagaatgttctatatcaaacttctagtagtattcttattattttatatatcccataccgggttcagtatgtatctcattggcaataattagccaaatattgatctactttcaggacctgcaaatcctaaacttaagcttctctactgtaaaccgcggacctgtgaattactgtattgagttagttttgcctctctgggtttagcgccccaatacaccgtcacgtaacctcccctcaatgccctccgatatacataaaagaccaccgaaagtcaggaagcaggcaaggcaatgggcgaatggggagtgcgcatgaattacagtacgggtccttcgtatgccaatctgattgccccgagatggctcaccgacctgtcggacttttaagccccgatgtccgactatcagatcggtggccgagaacatacgtgccgatatgatgatgtataaatttagcgatgtgccaaacaaaaagcctatacaattttgttctcccaaagacatacgttaacagcccttgctctgatctcagcttctccctttcttattgcacaactgccatgtctcatcctatcttgattatcggtgctgggcttggcggtctttgcttggctcagggactgaaaaaacgaaacattcctttcaaactatttgaacaggacggaaggcatgatcttcgaactcagggatatagattgagggtgggaagtgagggtatctacgcccttcgggataatctgtcgcctgagctatatgctctgttcgagaacacctgtgccgaaacggtaatggggggcgtgagaatcaaacccgatggtacactactaggcggcactggccctcctaggccccttgggtcggctgcttttatcgagccccagactgtggatcggagcactttccgtgaggttctgctgacaggtttggatgagcatgtgttttttggaaagagcttcgaccattacactgtgaacgacggaaacacaattgcattctttgcggatggctcgaaggaaactggatctctccttgttggtgcagatggagttcgatctagggtccgcaagcagtacataccagatttcatgggtatcgacaccggcatgcgcatcatctttggaaagacacccttgagccccgaatttctggctcggtttcccgaggcgtaccaccatggaatgtctcttgttttaaacccagacgatgaatcacggaccaccttgctatttgaatccatccgtttcccacacgcagaaaaagtctcgaaacctcagcttcccgacccatacgtgtattgggtgcttgtcactcattcctccaatatctcgtcgtcaaatggcacatcctggccattaagcccggaaaagtcagcggaacttgctcgacatgttaccaagtcatggcatcctgacttgcaggtgcttttcgagatgcaagacgaggctcaaacttcaacccgattgatgctttctgcctcaccagagttggcctcctgggagccctcgccccatgtgactttactcggcgacgcgattcatcccatgccaccaactggagcgatgggggccaacactgccttgcgtgacgctgcagatctggctcgcaggcttgaggttgcagtaagttcgcaaaccctcggtcgacatgtcatcggggagtatgaatcggagctacgggattcggctagaacggcaatcgcattaagctggcaaggtggcatgaaaggcttcaggctcaaatcagccgtggaatgcaagaagatcctcttatgatttcgctttagctagtattgaacttctctcacctctctgaactcctagctgttccctctttattgaatgtattgttaaggtatcatgccgccaaaacgaatcttcctcggtgtcatttttaatctcccgattattggctgctactcatcactctatgcggtagtgggtataggtcggccggtcctggttatagactcttccatcctcctatttggacagtttgagctatggtttggggtggccggctggcttgtgaaatagttaacgtaaaacgcggacctgtgaattactgtatccggttagttttgcctttttgggtttagcgccctaatacaccgtcatataacctccctcatgccctccgacatatgtaaaagacccgtcttcgctactcatcctcccctgacagcctgacaccgctaggtaatgcaaaccctgcaaacacttcaagacttgagtatctcgcttgtttcgtcgtgcagtcccttacgtacatataaatgcgtgtatcagaatgtctgccaaactacctctgatcaatttgaacaaacctgtatcatccactctggcctctgacctgaagcttgcccttcgtcggttcggagctttccgcctagtagtagcccctgaaaccaggcaacactgtcccgacgttgtcattgaaaaggcaggctaaacccactttcctggaatagcattcatcactgaccgcactcctcaggcacgggagttcttcacacaaccgattacagctaagacagacataaaaggatactctccttttgcttcggaacgtgttcgcggccgggctgagatacccaaagagagtatctattttttccgacatggcgccgaaccgaaccatctcaaggggccctcttgcaacttatatcgttcagtcaaatctcttcatgaggtaaaccgtccttgtcttctccctctttttctgtatcgtgctgattttcctttcaaggggtggacacctataaggctgcaattgttaaagaccatatcgcaggcactggactcggacacttccctaactggtactacgcttctcgattctgctactatcgggatacactattatgattctcgaagtcttcctgactttagcgcccatttcagtccccctcatatggatagcggaacattaaccattctattccggtctcataatgagaacgacggcctagaaattgctgatctcgaaacaacagagaaacaagacagtgaaggggttgggtcggaggcatcttttatgcacgttcctacttttggcgacgatgcccctgaggttgtcgtctttgcaggcactagactacagcgtttactcggacgcgaccgagttcgagcttgcgtgcatagagtccgcggaccaggcccggaggcgcacaataactctggtgtacaacgattgagcatcgcaatgttttgcgctccatctgggccatcaacctcaccgccctcatagttcataaatcgtattttaagttgatgagatatctagatgcagcgacgtagagtgaatccacgattattttgagtataagagcacaagcaagcaaaagtacatctacaaacgtgctggcggggcaccagtaatatgagcatccgtagaagactggatacgagcaccaagatctgcgttaacacgacggaacatctcgtaagtagcctttcgaacacgctcgtcagcgccgcacagatgaccagagatgttaccgacaaagttctcctgctggccaggggtacggccaaggacctgccataggccgttagcctggacgtagtcctcggaggtcacagggtactgctcggcgatgacagcaccagaccatttctcgtgttcctggctagccttgacgggcttgtaggcgagcggacggaaagtagaagggtagttggggttggcaccgtagttgccgttgacgttcatgtagccatcgcggtgtgaggggttgaaggctttgagtgggcagtttacggggatctgctcgtagttgccgcccaggcggtggcggtgcgtgtcggggtaagagaagaggcgggactgaaggacagggtcggcggagggctcgacaccagggaccatgtgggagggggagaaggcggcttgttcgatctccgcgaagtagttctgcggattcttgttcagggtgaagcggccgaaacggcgcagaggcacctcattctggggccagactttggtcaaatcgaagacgttccagcggaacttttcggccttttcggggctcaggacttgtacgtagcaggtccaagacggattctcgccgcgctggatggcctcaaataggtcctgggtgtgccagtcggggttctcggcggacagcttggtcgcctcatcgttggtcaaggttttgttgccctgatcagacttgcaatgaatctggacgtagttgaaggtgccgtctggcttgatccacttgtaggtgtggccggagtagccattcatgtgacggtatgagtatggggtaccgcggtcactgaacaggtgcataacctggtggacggactcatggtgggtggagaggtaatcccagaacatggtggcatccttgaggtttgtctgtgggttgcgcttttgagtgtggatgaagatggggaatttagcaggatcgcgcaggaagaaaactggggtgttgttgaacacccaatcccag
